(19) United States
(12) Patent Application Publication
(10) Pub. No.: US 2009/0203051 A1
(43) Pub. Date: Aug. 13, 2009

(54) TARGETS IN BREAST CANCER FOR PROGNOSIS OR THERAPY

(75) Inventors: Joe W. Gray, San Francisco, CA (US); Jane Fridlyand, Berkeley, CA (US); Richard Neve, San Mateo, CA (US); Paul Spellman, Benicia, CA (US); Koei Chin, Foster City, CA (US); Zhi Hu, El Cerrito, CA (US); Frederic Waldman, San Francisco, CA (US)

Correspondence Address: TOWNSEND AND TOWNSEND AND CREW, LLP, TWO EMBARCADERO CENTER, EIGHTH FLOOR, SAN FRANCISCO, CA, 94111-3834, US

(73) Assignee: The Regents of the University of California, Oakland, CA (US)

(21) Appl. No.: 12/330,386

(22) Filed: Dec. 8, 2008

Related U.S. Application Data
(63) Continuation-in-part of application No. PCT/US2007/070908, filed on Jun. 11, 2007.
(60) Provisional application No. 60/812,704, filed on Jun. 9, 2006.

(51) Int. Cl. A61K 31/7088; C12Q 1/68; C40B 30/04; G01N 33/574; G01N 33/68; C12N 5/06

(52) U.S. Cl. 435/7.23; 435/6; 506/9; 436/86; 435/375

(57) ABSTRACT

Cancer markers are developed to detect diseases characterized by increased expression of apoptosis-suppressing genes, such as aggressive cancers. Genome wide analyses of genome copy number and gene expression in breast cancer revealed 66 genes in the human chromosomal regions, 8p11, 11q13, 17q12, and 20q13 that were amplified. Diagnosis and assessment of amplification levels of genes shown to be amplified are useful in prediction of patient outcome of a of patient's response and drug resistance in breast cancer. Certain genes were found to be high priority therapeutic targets by the identification of recurrent aberrations involving genome sequence, copy number and/or gene expression are associated with reduced survival duration in certain diseases and cancers, specifically breast cancer. Inhibitors of these genes will be useful therapies for treatment of these non-responsive cancers.

### CROSS-REFERENCE TO RELATED APPLICATIONS

[0001] This application is a continuation-in-part of PCT application no. PCT/US2007/070908, filed Jun. 11, 2007, which claims priority to U.S. provisional patent application No. 60/812,704, filed on Jun. 9, 2006, each of which applications is hereby incorporated by reference in its entirety.

### STATEMENT OF GOVERNMENTAL SUPPORT

[0002] This invention was made during work supported by the National Cancer Institute, through Grants CA 58207 and CA 112970, and during work supported by the U.S. Department of Energy under Contract No. DE-AC03-76SF00098, now DE-AC02-05CH11231. The government has certain rights in this invention.

### REFERENCE TO ATTACHED TABLES AND SEQUENCE LISTINGS

[0003] This application incorporates by reference in their entirety the attached tables and sequence listing. Tables 1-6 and 8-10 are appended after the claims and are incorporated by reference. The content of the accompanying sequence listing is incorporated herein by reference in its entirety.

### FIELD OF THE INVENTION

[0004] The present invention relates to markers and chromosomal amplification correlated to disease, particularly malignant disease such as breast cancer. More specifically, the present invention relates to using cancer markers and chromosomal region analyses for the prediction of patient outcome in breast cancer patients. The present invention also relates to markers and therapeutics targeting in vivo drug resistance. More specifically, the present invention relates to the diagnosis and treatment using cancer markers and therapeutics which target drug resistance in breast cancer patients with low survival rates.

### BACKGROUND OF THE INVENTION

[0005] Breast cancer is one of the most common malignancies among women and shares, together with lung carcinoma, the highest fatality rate of all cancers affecting females. The current treatment of the breast cancer is limited to a very invasive, total or partial mastectomy, radiation therapy, or chemotherapy, later two resulting in serious undesirable side effects.

[0006] It is now well established that breast cancers progress through accumulation of genomic (Albertson et al., 2003; Knuutila et al., 2000) and epigenomic (Baylin and Herman, 2000; Jones, 2005) aberrations that enable development of aspects of cancer pathophysiology such as reduced apoptosis, unchecked proliferation, increased motility, and increased angiogenesis (Hanahan and Weinberg, 2000). Discovery of the genes that contribute to these pathophysiologies when deregulated by recurrent aberrations is important to understanding mechanisms of cancer formation and progression and to guide improvements in cancer diagnosis and treatment.

[0007] Analyses of expression profiles have been particularly powerful in identifying distinctive breast cancer subsets that differ in biological characteristics and clinical outcome (Perou et al., 1999; Perou et al., 2000; Sorlie et al., 2001; Sorlie et al., 2003). For example, unsupervised hierarchical clustering of microarray derived expression data have identified intrinsically variable gene sets that distinguish five breast cancer subtypes—basal-like, luminal A, luminal B, ERBB2 and normal breast-like. The basal-like and ERBB2 subtypes have been associated with strongly reduced survival durations in patients treated with surgery plus radiation (Perou et al., 2000; Sorlie et al., 2001) and some studies have suggested that reduced survival duration in poorly performing subtypes is caused by an inherently high propensity to metastasize (Ramaswamy et al., 2003). These analyses already have led to the development of multi-gene assays that stratify patients into groups that can be offered treatment strategies based on risk of progression (Esteva et al., 2005; Gianni et al., 2005; van 't Veer et al., 2002). However, the predictive power of these assays is still not as high as desired and the assays have not been fully tested in patient populations treated with aggressive adjuvant chemotherapies.

[0008] Analyses of breast tumors using fluorescence in situ hybridization (Al-Kuraya et al., 2004; Kallioniemi et al., 1992; Press et al., 2005; Tanner et al., 1994) and comparative genomic hybridization (Kallioniemi et al., 1994; Loo et al., 2004; Naylor et al., 2005; Pollack et al., 1999) show that breast tumors also display a number of recurrent genome copy number aberrations including regions of high level amplification that have been associated with adverse outcome (Al-Kuraya et al., 2004; Cheng et al., 2004; Isola et al., 1995; Jain et al., 2001; Press et al., 2005). This raises the possibility of improved patient stratification through combined analysis of gene expression and genome copy number (Barlund et al., 2000; Pollack et al., 2002; Ray et al., 2004; Yi et al., 2005). In addition, several studies of specific chromosomal regions of recurrent abnormality at 17q12 (Kauraniemi et al., 2001; Kauraniemi et al., 2003) and 8p11 (Gelsi-Boyer et al., 2005; Ray et al., 2004) show the value of combined analysis of genome copy number and gene expression for identification of genes that contribute to breast cancer pathophysiology by deregulating gene expression.

[0009] Nevertheless, there is a continued need for further understanding of the genes, and of the chromosomal aberration(s) that occur in cancer, for example breast cancer.

### BRIEF SUMMARY OF THE INVENTION

[0010] Disclosed herein are roles of genome copy number abnormalities (CNAs) in breast cancer pathophysiology by identifying associations between recurrent CNAs, gene expression and clinical outcome in a set of aggressively treated early stage breast tumors. It shows that the recurrent CNAs differ between tumor subtypes defined by expression pattern and that stratification of patients according to outcome can be improved by measuring both expression and copy number; especially high level amplification. Sixty-six genes (set forth in Table 3) deregulated by the high level amplifications are therapeutic targets; nine of these genes (FGFR1, IKBKB, ERBB2, PROSC, ADAM9, FNTA, ACA CA, PNMT, and NR1D1) are “druggable.” Low level CNAs appear to contribute to cancer progression by altering RNA and cellular metabolism.

[0011] As used herein gene amplification is used in a broad sense. It comprises an increase of gene copy number; it can also comprise assessment amplification of the gene product. Thus levels of gene expression, as well as corresponding protein expression can be evaluated. In the embodiments that follow, it is understood that assessment of gene expression can be used to assess level of gene product such as RNA or protein.

[0012] Thus, embodiments of the invention include: A method for prognosing the outcome of a patient with breast cancer, said method comprising: providing breast cancer tissue from the patient; determining from the provided tissue, the level of gene amplification or gene expression for at least one gene set forth in Table 3; identifying that the at least one gene or gene product is amplified; whereby, when the at least one gene or gene product is amplified, this is an indication that the patient has the predicted disease free survival or probability for distant recurrence set forth in Table3. This method can comprise that the gene or gene product is ACACA (SEQ ID NOs: 1, 2), ADAM9 (SEQ ID NOs: 3-8), ERBB2 (SEQ ID NOs: 9-14), FGFR1 (SEQ ID NOs: 15, 16), FNTA (SEQ ID NOs: 17, 18), IKBKB (SEQ ID NOs: 19, 20), NR1D1 (SEQ ID NOs: 21, 22), PNMT (SEQ ID NOs: 23, 24), or PROSC (SEQ ID NOs: 25, 26); in particular PROSC (SEQ ID NOs: 25, 26), ADAM9 (SEQ ID NOs: 3-8), FNTA (SEQ ID NOs: 17, 18), ACACA (SEQ ID NOs: 1, 2), PNMT (SEQ ID NOs: 23, 24), or NR1D1 (SEQ ID NOs: 21, 22). In one preferred embodiment, the gene, ADAM9 (SEQ ID NOs: 3, 5 and 7) is a therapeutic target. In certain embodiments, there is a proviso that the gene or gene product is not ERBB2 (SEQ ID NOs: 9-14), FGFR1 (SEQ ID NOs: 15, 16), or IKBKB (SEQ ID NOs: 19, 20). The detecting step can comprise use a of methodology selected from the group consisting of quantitative PCR, FISH, array CGH, quantitative PCR, in situ hybridization for RNA, immunohistochemistry and reverse phase protein lysate arrays for protein. In some embodiments, the gene or gene product is FGF3 (SEQ ID NOs: 65, 66), PPFIA1 (SEQ ID NOs: 69, 70), NEU3 (SEQ ID NOs: 79, 80), CSTF1 (SEQ ID NOs: 117, 118), PCK1 (SEQ ID NOs: 123, 124), VAPB (SEQ ID NOs: 129, 130), GNAS (SEQ ID NOs: 135, 136), BCAS1 (SEQ ID NOs: 115, 116), TMEPA1 (SEQ ID NOs: 125, 126), or STX16 (SEQ ID NOs: 131, 132). In certain embodiments, the gene or gene product is FGF3 (SEQ ID NOs: 65, 66), PPFIA1 (SEQ ID NOs: 69, 70), NEU3 (SEQ ID NOs: 79, 80), GNAS (SEQ ID NOs: 135, 136), TMEPA1 (SEQ ID NOs: 125, 126), STX16 (SEQ ID NOs: 131, 132), or VAPB (SEQ ID NOs: 129, 130). In some embodiments, the breast cancer is a luminal A breast cancer and the gene or gene product is a gene or encoded by a gene at 11q13-14 and/or 20q13, e.g., FGF3 (SEQ ID NOs: 65, 66), PPFIA1 (SEQ ID NOs: 69, 70), NEU3 (SEQ ID NOs: 79, 80), GNAS (SEQ ID NOs: 135, 136), TMEPA1 (SEQ ID NOs: 125, 126), STX16 (SEQ ID NOs: 131, 132), or VAPB (SEQ ID NOs: 129, 130).

[0013] An embodiment in accordance with the invention comprises: A method for selecting a patient for treatment with a drug that modulates the expression of a gene set forth in Table 3, said method comprising: providing tissue biopsy from the patient; determining from the provided tissue, the level of gene amplification or gene product expression for a gene set forth in Table 3; identifying that one or more of the genes or gene products is amplified; whereby, when the one or more genes or gene products are amplified, this gene and/or gene product is a candidate for treatment with a drug that modulates the expression of the one or more gene of Table 3 or a drug that affects a protein of Table 3. In certain embodiments, the gene or product is ACACA (SEQ ID NOs: 1, 2), ADAM9 (SEQ ID NOs: 3-8), ERBB2 (SEQ ID NOs: 9-14), FGFR1 (SEQ ID NOs: 15, 16), FNTA (SEQ ID NOs: 17, 18), IKBKB (SEQ ID NOs: 19, 20), NR1D1 (SEQ ID NOs: 21, 22), PNMT (SEQ ID NOs: 23, 24), or PROSC (SEQ ID NOs: 25, 26); in particular PROSC (SEQ ID NOs: 25, 26), ADAM9 (SEQ ID NOs: 3-8), FNTA (SEQ ID NOs: 17, 18), ACACA (SEQ ID NOs: 1, 2), PNMT (SEQ ID NOs: 23, 24), or NR1D1 (SEQ ID NOs: 21, 22).; and in one embodiment, particularly, ADAM9. In certain embodiments, there is a proviso that the gene or gene product is not ERBB2 (SEQ ID NOs: 9-14), FGFR1 (SEQ ID NOs: 15, 16), or IKBKB (SEQ ID NOs: 19, 20). In some embodiments, the gene or gene product is FGF3 (SEQ ID NOs: 65, 66), PPFIA1 (SEQ ID NOs: 69, 70), NEU3 (SEQ ID NOs: 79, 80), CSTF1 (SEQ ID NOs: 117, 118), PCK1 (SEQ ID NOs: 123, 124), VAPB (SEQ ID NOs: 129, 130), GNAS (SEQ ID NOs: 135, 136), BCAS1 (SEQ ID NOs: 115, 116), TMEPA1 (SEQ ID NOs: 125, 126), or STX16 (SEQ ID NOs: 131, 132). In certain embodiments, the gene or gene product is FGF3 (SEQ ID NOs: 65, 66), PPFIA1 (SEQ ID NOs: 69, 70), NEU3 (SEQ ID NOs: 79, 80), GNAS (SEQ ID NOs: 135, 136), TMEPA1 (SEQ ID NOs: 125, 126), STX16 (SEQ ID NOs: 131, 132), or VAPB (SEQ ID NOs: 129, 130). In some embodiments, the breast cancer is a luminal A breast cancer and the gene or gene product is a gene or encoded by a gene at 11q13-14 and/or 20q13, e.g., FGF3 (SEQ ID NOs: 65, 66), PPFIA1 (SEQ ID NOs: 69, 70), NEU3 (SEQ ID NOs: 79, 80), GNAS (SEQ ID NOs: 135, 136), TMEPA1 (SEQ ID NOs: 125, 126), STX16 (SEQ ID NOs: 131, 132), or VAPB (SEQ ID NOs: 129, 130). The determining step can comprise use a of methodology selected from the group consisting of quantitative PCR, FISH, array CGH, quantitative PCR, in situ hybridization for RNA, immunohistochemistry and reverse phase protein lysate arrays for protein.

[0014] An embodiment of the invention comprises: A method for treatment of a patient with breast cancer, said method comprising: providing tissue biopsy from the patient; determining from the provided tissue, the level of gene amplification or level of gene product for a gene set forth in Table 3; identifying that one or more of the genes or gene products is amplified; whereby, when the one or more genes or gene products are amplified, this patent is treated with a drug that modulates the expression of the one or more gene or a drug that affects the gene product. In certain embodiments, the gene or gene product is ACACA (SEQ ID NOs: 1, 2), ADAM9 (SEQ ID NOs: 3-8), ERBB2 (SEQ ID NOs: 9-14), FGFR1 (SEQ ID NOs: 15, 16), FNTA (SEQ ID NOs: 17, 18), IKBKB (SEQ ID NOs: 19, 20), NR1D1 (SEQ ID NOs: 21, 22), PNMT (SEQ ID NOs: 23, 24), or PROSC (SEQ ID NOs: 25, 26); in particular PROSC (SEQ ID NOs: 25, 26), ADAM9 (SEQ ID NOs: 3-8), FNTA (SEQ ID NOs: 17, 18), ACACA (SEQ ID NOs: 1, 2), PNMT (SEQ ID NOs: 23, 24), or NR1D1 (SEQ ID NOs: 21, 22).; or more particularly in one embodiment, ADAM9. In certain embodiments there is a proviso that the gene or gene product is not ERBB2(SEQ ID NOs: 9-14), FGFR1 (SEQ ID NOs: 15, 16), or IKBKB (SEQ ID NOs: 19, 20). In some embodiments, the gene or gene product is FGF3 (SEQ ID NOs: 65, 66), PPFIA1 (SEQ ID NOs: 69, 70), NEU3 (SEQ ID NOs: 79, 80), CSTF1 (SEQ ID NOs: 117, 118), PCK1 (SEQ ID NOs: 123, 124), VAPB (SEQ ID NOs: 129, 130), GNAS (SEQ ID NOs: 135, 136), BCAS1 (SEQ ID NOs: 115, 116), TMEPA1 (SEQ ID NOs: 125, 126), or STX16 (SEQ ID NOs: 131, 132). In certain embodiments, the gene or gene product is FGF3 (SEQ ID NOs: 65, 66), PPFIA1 (SEQ ID NOs: 69, 70), NEU3 (SEQ ID NOs: 79, 80), GNAS (SEQ ID NOs: 135, 136), TMEPA1 (SEQ ID NOs: 125, 126), STX16 (SEQ ID NOs: 131, 132), or VAPB (SEQ ID NOs: 129, 130). In some embodiments, the breast cancer is a luminal A breast cancer and the gene or gene product is a gene or encoded by a gene at 11q13-14 and/or 20q13, e.g., FGF3 (SEQ ID NOs: 65, 66), PPFIA1 (SEQ ID NOs: 69, 70), NEU3 (SEQ ID NOs: 79, 80), GNAS (SEQ ID NOs: 135, 136), TMEPA1 (SEQ ID NOs: 125, 126), STX16 (SEQ ID NOs: 131, 132), or VAPB (SEQ ID NOs: 129, 130). In one embodiment the drug is an antisense sequence for a gene of Table 3, and the particular antisense sequence corresponds to the one or more amplified genes identified in the identifying step. The determining step can comprise use a of methodology selected from the group consisting of quantitative PCR, FISH, array CGH, quantitative PCR, in situ hybridization for RNA, immunohistochemistry and reverse phase protein lysate arrays for protein.

[0015] Another embodiment of the invention comprises: A method for identifying a moiety that modulates a protein, said method comprising: providing a protein selected from the group consisting of PROSC (SEQ ID NO: 26), ADAM9 (SEQ ID NOs: 4, 6, or 8), FNTA (SEQ ID NO: 18), ACACA (SEQ ID NO: 2), PNMT (SEQ ID NO: 24), or NR1D1 (SEQ ID NO: 22); screening the provided protein with a candidate moiety; determining whether the candidate moiety modules (e.g., alters function or expression) of the protein; and, selecting a moiety that modules the protein. A further embodiment comprises: A method for modulating a PROSC (SEQ ID NO: 26), ADAM9 (SEQ ID NOs: 4, 6 or 8), FNTA (SEQ ID NO: 18), ACACA (SEQ ID NO: 2), PNMT (SEQ ID NO: 24), or NR1D1 (SEQ ID NO: 22) protein in a living cell, said method comprising: providing a moiety that modulates the protein; administering the moiety to a living cell that expresses PROSC, ADAM9, FNTA, ACACA, PNMT, or NR1D1 protein corresponding to the moiety; whereby, PROSC, ADAM9, FNTA, ACACA, PNMT, or NR1D1 protein in the cell is modulated.

[0016] Another embodiment of the invention comprises a method for prognosing the outcome of a patient with breast cancer, said method comprising: providing breast cancer tissue from the patient; determining from the provided tissue, the level of gene deletion for at least one gene from amplicon 8p11-12; identifying that the at least one gene is deleted; whereby, when the at least one gene is deleted, this is an indication that the patient has the predicted disease free survival or probability for distant recurrence set forth in Table3. In certain embodiments, the at least one gene from amplicon 8p11-12 is selected from the chromosome 8 genes set forth in Table 3. The determining step can comprise use a of methodology selected from the group consisting of quantitative PCR, FISH, array CGH, quantitative PCR, in situ hybridization for RNA, immunohistochemistry and reverse phase protein lysate arrays for protein.

### BRIEF DESCRIPTION OF THE DRAWINGS

[0017] FIG. 1. Recurrent abnormalities in 145 primary breast tumors.

[0018] FIG. 1(a). Frequencies of genome copy number gain and loss plotted as a function of genome location with chromosomes 1pter to the left and chromosomes 22qter and X to the right. Vertical lines indicate chromosome boundaries and vertical dashed lines indicate centromere locations. Positive and negative values indicate frequencies of tumors showing copy number increases and decrease respectively with gain and loss as described in the methods.

[0019] FIG. 1(b). Frequencies of tumors showing high level amplification. Data are displayed as described in FIG. 1(a).

[0020] FIG. 1(c-j). Frequencies of tumors showing significant copy number gains and losses as defined in FIG. 1(a) (upper member of each pair) or high level amplifications as defined in FIG. 1(b) (lower member of each pair) in tumor subtypes defined according to expression phenotype; FIG. 1(c) & FIG. 1(d), basal-like; FIG. 1(e) & FIG. 1(f), ERBB2;

[0021] FIG. 1(g) & FIG. 1(h), luminal A; FIG. 1(i) & FIG. 1(j), luminal B. Data are displayed as described in FIG. 1(a).

[0022] FIG. 2. Unsupervised hierarchical clustering of genome copy number profiles measured for 145 primary breast tumors. Green indicates increased genome copy number and red indicates decreased genome copy number. The three major genomic clusters from left to right are designated 1q/16q, Complex and Amplifying. The bar to the left indicates chromosome locations with chromosome 1pter to the top and 22qter and X to the bottom. The locations of the odd numbered chromosomes are indicated. The upper color bars indicate biological and clinical aspects of the tumors. Color codes are indicated at the bottom of the figure. Dark blue indicates positive status, light blue indicates negative status for Nodes, ER, PR and p53 expression. For Ki67, dark blue=fraction >0.1 and light blue=fraction <0.1. For size, light blue indicates size <2.2 cm, and dark blue indicates size >2.2 cm. Color codes for the expression bar are orange=luminal A, dark blue=normal breast-like, light blue=ERBB2, green=basal-like, yellow=luminal B.

[0023] FIG. 3. Kaplan Meyer plots showing survival in breast tumor subclasses.

[0024] FIG. 3(a). Disease specific survival in 130 breast cancer patients whose tumors were defined using expression profiling to be basal-like (third curve down), luminal A (top curve), luminal B (second curve from top) and ERBB2 class (bottom curve).

[0025] FIG. 3(b). Disease-specific survival of patients with tumors classified by genome copy number aberration analysis as 1q/16q (top curve), Complex (red) and Amplifying (blue).

[0026] FIG. 3(c). Survival of patients with (bottom curve) and without (top curve) amplification at any region of recurrent amplification.

[0027] FIG. 3(d). Survival of patients whose tumors were defined using expression profiling to be luminal A tumors with (bottom curve) and without (top curve) amplification at 8p11-12, 11q13, and/or 20q.

[0028] FIG. 3(e). Survival of patients whose tumors that were not amplified at 8p11-12 and that had normal (top curve) or reduced (bottom curve) genome copy number at 8p11-12.

[0029] FIG. 3(f). Survival of patients whose tumors had normal (top curve) or abnormal (bottom curve) genome copy number at 8p11-12.

[0030] FIG. 4. Results of unsupervised hierarchical clustering of 130 breast tumors using intrinsically variable gene expression but excluding any transcripts whose levels were significantly associated with genome copy number. Red indicates increased expression and green indicates reduced expression.

[0031] FIG. 5. Comparison of recurrent genome aberrations in 145 primary breast tumors with low-level genome copy number aberrations selected in human mammary epithelial cells during passage through telomere crisis (Chin et al., 2004).

[0032] FIG. 5(a). Frequencies of genome copy number gain and loss plotted as described in FIG. 1(a).

[0033] FIG. 5(b). Array CGH analyses of genome copy number for human mammary epithelial cells at passages 16 and 21 before transition through telomere crisis (upper two traces) and at passages 28 and 44 after immortalization (lower two traces) (Chin et al., 2004).

[0034] FIG. 6. Unsupervised hierarchical clustering of expression profiles measured for 148 tumors based on a published set of intrinsically variably genes, URL:<http://www.pnas.org/cgi/content/full 100/14/8418>, matched by UniGene ID 280 unique out of 464 gene probes in Affymetrix GeneChip). Tumor IDs under dendogram were color-coded red; basaloid, pink; ERBB2, blue; luminal A and light blue; luminal B) based on the closest distance to each subtype in 79 tumors of Stanford samples. Expression values in the cluster diagram were median centered for each gene. Similarly color-coded maker gene names for each subtype were displayed with UniGene IDs on the right of cluster diagram. These marker genes were highly expressed in the each subtype indicated in red in the cluster diagram. For redundant genes with correlation >0.45, expression values were averaged. ER positive and negative status is indicated in yellow and blue respectively under tumor ID, which corresponds well to erbB2 and basal type tumors.

[0035] FIG. 7. Graphs showing that transient transfection of siRNA for ADAM9 into (a) T47D, (b) BT549, (c) SUM52PE breast cancer cell lines strongly inhibits growth in breast cancer cells.

[0036] FIG. 8. Graphs showing that silencing of ADAM9 decreased proliferation of breast cancer cells (a) BT549 and (b) SUM52PE, but not (c) normal cells MCF10A.

[0037] FIG. 9. Down-regulation of ADAM9 by siRNA increased apoptosis in breast cancer cells as determined by detecting Yo-Pro staining.

[0038] FIG. 10. By detecting cell survival rates, growth inhibition was achieved by >30 nM siRNA in BT549 and SUM52PE breast cancer cells.

[0039] FIG. 11. siFGF3, siPPFIA1 and siNEU3 specifically inhibited cell growth in highly amplified cell lines. Cell viability was measured by the Luminescence cell viability assay (Promega Inc.) following treatment with siRNAs for 72 hours. The inhibition rate was achieved by comparison to non-target negative controls (siControl).

[0040] FIG. 12. siFGF3, siPPFIA1 and siNEU3 induced cell apoptosis in 11q13 highly amplified cell lines, but not in not-amplified cell line. Cell apoptosis was assayed using YoPro-1 and Hoechst staining with the Cellomics high content scanning instrument in 72 hours post transfection. The fold of apoptosis was achieved by normalizing to control siRNA(siControl).

[0041] FIG. 13. shRNAs can efficiently knock down FGF3, NEU3 and PPFIA1 in breast cancer cells. Protein levels were confirmed by western blot after infection of breast cancer cells with shRNAs (five shRNAs targeting different sequences/gene). Actin was the loading control. Each gene had at least one shRNA that could efficiently knock down the target gene.

[0042] FIG. 14. Knockdown of FGF3, PPFIA1 and NEU3 by shRNAs induces cell apoptosis CAMA1 cells with Caspase3 Glo assay(Promega) and YoPro/Hochest double staining.

[0043] FIG. 15. Silencing of FGF3, PPFIA1 and NEU3 by shRNAs inhibit cell growth in 3D culture. Cells that had knocked down FGF3, PPFIA1 and NEU3 proteins (with shRNAs_(#38160 shFGF3, #2969 shPPFIA1 and #5149 shNEU3 respectively) were evaluated in 3D culture. The HCC1954 and CAMA1 cells with shFGF3, shPPFIA1 and/or shNEU3 were very unhealthy and died off. The colonies were much smaller for cells with shFGF3 shPPFIA1 and/or shNEU3 than control cells. The morphology also changed compared to control cells, which had typical mass-like morphology of HCC1954 (grape like morphology of CAMA 1 cells).

[0044] FIG. 16. Synergistic effects on combinational knockdown of NEU3 and PPFIA1 genes at 11q13 amplicon. Cell viability/proliferation was evaluated by Cell Titer-Glo luminescent cell viability assay (Promega) after cells had been infected with shRNA lentivirus for 6 days. The cell viability percentage was normalized to control shRNA. Cell apoptosis was analyzed with YoPro-1 and Hoechst staining using the Cellomics high content scanning instrument after cells had been infected with shRNA lentivirus for 6 days.

[0045] FIG. 17. Candidate Therapeutics on 20q13 amplicon. The cell viability was measured by Luminescence cell viability assay (Promega Inc.) following treatment with siRNAs for 72 hours. The inhibition rate was determined in comparison to non-target negative control(siControl).

[0046] FIG. 18. GNAS, STX16, TMEPA1 and VAPB siRNAs inhibit cell proliferation by BrdU and Hoeschst staining.

[0047] FIG. 19. GNAS, STX16, TMEPA1 and VAPB siRNAs inhibit apoptosis by YoPro-1 and Hoeschst staining.

[0048] FIG. 20. Caspase3 activity increased in SUM52PE cells treated with GNAS, STX16, TMEPA1, and VAPB siRNAs.

[0049] FIG. 21. GNAS siRNAs knocked down Gs transcripts in breast cancer cell lines.

### BRIEF DESCRIPTION OF THE TABLES

[0050] Table 1. Univariate and multivariate associations for individual amplicons and/or disease specific survival and distant recurrence. Also shown are the chromosomal positions of the beginning and ends of the amplicons and the flanking clones. Associations are shown for the entire sample set and for luminal A tumors (univariate associations only).

[0051] Table 2. Associations of genomic variables with clinical features.

[0052] Table 3. Functional characteristics of 66 genes; these genes are in recurrent amplicons associated with reduced survival duration in breast cancer. Functional annotation was based on the Human Protein Reference Database (http://hprd.org). Genes highlighted in dark gray are associated with reduced survival duration or distant recurrence when over expressed in non-Amplifying tumors. Genes highlighted in light gray are significantly associated with reduced survival duration or distant recurrence (p<0.05) when down regulated in non-Amplifying tumors. Distances to sites of recurrent viral integration were determined from published information (Akagi et al., 2004). The last column identifies genes having predicted protein folding characteristics indicating that they are druggable (see, e.g., Russ and Lampel, 2005).

[0053] Table 4. Univariate p-values with the corresponding 95% confidence intervals for associations with disease-specific survival and distant recurrence endpoints and the corresponding multivariate results for those found to be significant in univariate analyses (p<0.05) for at least one of the clinical end points. Only variables individually significant at p<0.05 for at least one of the two end points are included in the multivariate regression. Stage and SBR Grade are treated as continuous variables rather than factors. In each column pair, the left subcolumn lists results for disease-specific survival and the right subcolumn lists results for time to distant recurrence.

[0054] Table 5. Comparison of the association between expression subtypes and survival duration in 3 datasets. Log-likelihood ratio test p-value is shown for each model. Basal is the reference in all models. Multivariate models include size and nodal status. In multivariate analyses, the first value shown in each cell is the p-value and the second is the ratio of the medians in the compared groups.

[0055] Table 6. Identities of 1432 gene transcripts showing significant associations between genome copy numbers measured using array CGH and transcript levels measured using Affymetrix U133A expression arrays in 101 primary breast tumors. Data will be available through CaBIG and a public web site.

[0056] Table 7. The set of genes in Table 3, shown with the corresponding GenBank Accession numbers and the SEQ ID NOs assigned for the gene and gene products.

[0057] Table 8. Sequences of siRNAs targeting various human genes encoded by amplicon 11q13.

[0058] Table 9. Sequences of shRNAs targeting human NEU3, FGF3 and PPFIA1 genes.

[0059] Table 10. Sequences of siRNAs targeting various human genes encoded by amplicon 20q13.

### DETAILED DESCRIPTION OF THE PREFERRED EMBODIMENTS

[0060] In order to further the understanding of the genes, and of the chromosomal aberration(s) that occur in cancer, for example breast cancer we performed combined analyses of genome copy number and gene expression to identify genes that contribute to breast cancer pathophysiology with emphasis on those that are associated with poor response to current therapies.

[0061] By associating clinical endpoints with genome copy number and gene expression, we showed strong associations between expression subtype and genome aberration composition and we identified four human chromosomal regions (8p11-12, 11q13-14, 17q12 and/or 20q13) of recurrent amplification associated with poor outcome in treated patients. Gene expression profiling revealed 66 genes (see, e.g., Table 3 and Table 7) in these regions of amplification whose expression levels were deregulated by the high-level amplifications. We also found a surprising association between low level CNAs (genome copy number abnormality CNA) and up-regulation of genes associated with RNA and protein metabolism that may suggest a new mechanism by which these aberrations contribute to cancer progression.

[0062] We disclose a comprehensive analysis of gene expression and genome copy number in aggressively treated primary human breast cancers performed in order to identify (a) genomic events that are assayed to better stratify patients according to clinical behavior, (b) identify how molecular aberrations contribute to breast cancer pathogenesis and (c) discover genes that are therapeutic targets in patients that do not respond well to current therapies.

Molecular Markers that Predict Outcome

[0063] We focused in this study on combined analyses of genome copy number and gene expression in tumors from patients who had aggressive treatment with surgery, radiation of the surgical margins, and hormonal therapy for ER positive disease and aggressive adjuvant chemotherapy as indicated (typically adriamycin and cytoxan but not including Trastuzumab). Analyses of markers in the context of this treatment regimen allowed us to identify those that predicted outcome in patients whose tumors were treated more aggressively than in previously published studies (Esteva et al., 2005; Gianni et al., 2005; van 't Veer et al., 2002). Our analyses of this aggressively treated patient cohort revealed two important associations.

[0064] First, we found that the survival of patients with tumors classified as basal-like according to expression pattern did not have significantly worse outcome than patients with luminal or normal-like tumors in this tumor set, unlike previous reports (van 't Veer et al., 2002; van de Vijver et al., 2002) (see FIG. 3(a)). However, patients with ERBB2 positive tumors did do worse (significantly increased death from disease and shorter recurrence-free survival; p<0.001 and p<0.01 respectively, log-rank test) in accordance with the earlier studies. This suggests that the aggressive chemotherapy employed for treatment of the predominantly ER negative basal-like tumors increased survival duration in these patients relative to patients with tumors in the other subgroups. Thus, outcome for patients with basal-like tumors may not be as bad as indicated by earlier prognostic studies of patient populations that did not receive aggressive chemotherapy for progressive disease. This result emphasizes the need to interpret the performance of molecular markers for patient stratification in the context of specific treatment regimens.

[0065] Secondly, we found that aggressively treated patients with high level amplification had worse outcome than did patients without amplification (see FIG. 3(c)). This is consistent with earlier CGH and single locus analyses of associations of amplification with poor prognosis (Al-Kuraya et al., 2004; Blegen et al., 2003; Callagy et al., 2005; Gelsi-Boyer et al., 2005; Weber-Mangal et al., 2003). Moreover, the presence of high level amplification was an indicator of poor outcome, even within patient subsets defined by expression profiling. This was particularly apparent for luminal A tumors as illustrated in FIG. 3(d) where patients whose tumors had high level amplification at 8p11-12, 11q13-14 or 20q13 did significantly worse than patients without amplification. This shows that that stratification according to both expression level and copy number will identify patients that respond poorly to current therapeutic treatment strategies.

### Mechanisms of Disease Progression

[0066] Our combined analyses of genome copy number and gene expression showed substantial differences in recurrent genome abnormality composition between tumors classified according to expression pattern and revealed that over 10% of the genes interrogated in this study had expression levels that were highly significantly associated with genome copy number changes. Most of the gene expression changes were associated with low level changes in genome copy number, but 66 were deregulated by the high level amplifications associated with poor outcome (see Table 3), as defined as having a multiple testing corrected p-value of less than 0.05. These analyses provide evidence of: the etiology of breast cancer subtypes, mechanisms by which the low-level copy number changes contribute to cancer pathogenesis and identify a suite of genes that contribute to cancer pathophysiology when over expressed as a result of high level amplification.

[0067] Breast cancer subtypes. FIGS. 1 and 2 show that recurrent genome copy number aberrations differ substantially between tumors classified according to expression pattern as described previously (Perou et al., 1999). Basal-like tumors carried genome aberrations similar to those reported for tumors arising in BRCA1 carriers. High level amplifications were rare in these tumors. ERBB2 tumors were amplified at and distal to the ERBB2 locus on chromosome 17 but amplifications of regions on other chromosomes were rare in this tumor subset(Isola et al., 1999). Luminal A tumors carried frequent gains at 1q and 16p and losses at 16q and carried recurrent amplifications involving 8p11-12, 11q13-14, 17q11-12 and 20q13. Luminal B tumors showed many regions of genome copy number abnormality (CNA) as well as frequent amplification of three regions of chromosomes 8.

[0068] The differences in recurrent aberration composition between expression subtypes is consistent with a model of cancer progression in which the expression subtype and genotype are determined by the cell type and stage of differentiation that survives telomere crisis and acquires sufficient proliferative advantage to achieve clonal dominance in the tumor (Chin et al., 2004). This model indicates that the genome CNA spectrum is selected to be most advantageous to the progression of the specific cell type that achieves immortality and clonal dominance. In this model, the recurrent genome CNA composition can be considered an independent subtype descriptor—much as genome CNA composition can be considered to be a cancer type descriptor (Knuutila et al., 2000). The independence of the genome CNA composition and basal and luminal expression subtypes is clear from FIG. 4 which shows that the breast tumors divide into basal and luminal subtypes using unsupervised hierarchical clustering even after all transcripts showing associations with copy number are removed from the data set. Of course the ERBB2 subtype is lost since that subtype is strongly driven by ERBB2 amplification.

[0069] Low level abnormalities. The most frequent low-level copy number changes were not associated with reduced survival duration although some were associated with other markers usually associated with survival such as tumor size, nodal status, and grade (see Table 2). This raises the question of why the recurrent low-level CNAs are selected. To understand this, we applied the statistical tool GOstat to determine the ontology of the genes deregulated by these abnormalities. This analysis showed that numerous genes involved in RNA and cellular metabolism were significantly up-regulated by these events. Interestingly, we also observed that many of the recurrent low-level aberrations matched the low-level copy number changes in the ZNF217-transfected human mammary epithelial cells that emerged after passage through telomere crisis having achieved clonal dominance in the culture (see FIG. 5)—presumably because the aberrations they carried conferred a proliferative advantage (Chin et al., 2004). This indicates that the low-level CNAs contribute to early cancer formation by increasing basal metabolism thereby providing a net survival/proliferative advantage to the cells that carry them. This idea is supported by a report that some of these same classes of genes were associated with proliferative fitness yeast (Deutschbauer et al., 2005). That study described analyses of proliferative fitness in the complete set of Saccharomyces cerevisiae heterozygous deletion strains and reported reduced growth rates for strains carrying deletions in genes involved in RNA metabolism and ribosome biogenesis and assembly.

[0070] High level amplification. We found that high level amplifications of 8p11-12, 11q13-14, 17q12 and/or 20q13 were associated with reduced survival duration and/or distant recurrence overall, and within the luminal A expression subgroup. We identified 66 genes (see, e.g., Table 3) in these regions whose expression levels were correlated with copy number. These 66 genes are shown in Table 7 below along with the GenBank Accession numbers for each of the genes and gene products (proteins), the records of which are hereby incorporated by reference for all purposes. Also shown are the corresponding SEQ ID NOs as assigned here and shown in the sequence listing attached herein in computer readable form.

TABLE 7
Table 3 genes and their GenBank Accession and SEQ ID Numbers.

| | | DNA | Protein GenBank | PROTEIN |
|---|---|---|---|---|
| Gene | Genbank Accession No. | SEQ ID NO: | Accession Number | SEQ ID NO: |
| ACACA | NM_198839.1 | SEQ ID NO: 1 | NP_942136.1 | SEQ ID NO: 2 |
| | GI: 38679976 | | | |
| ADAM9 | AF495383 | SEQ ID NO: 3 | AAM49575.1 | SEQ ID NO: 4 |
| | var1: NM_003816; | SEQ ID NO: 5 | NP_003807.1 | SEQ ID NO: 6 |
| | var2: NM_001005845; | SEQ ID NO: 7 | NP_001005845.1 | SEQ ID NO: 8 |
| ERBB2 | AY208911; | SEQ ID NO: 9 | AAO18082.1; | SEQ ID NO: 10 |
| | NM_004448; | SEQ ID NO: 11 | NP_004439.2; | SEQ ID NO: 12 |
| | NM_001005862 | SEQ ID NO: 13 | NP_001005862.1 | SEQ ID NO: 14 |
| FGFR1 | AY585209 | SEQ ID NO: 15 | NP_075599.1 | SEQ ID NO: 16 |
| FNTA | NM_002027 | SEQ ID NO: 17 | NP_002018.1 | SEQ ID NO: 18 |
| IKBKB | AY663108; or | SEQ ID NO: 19 | AAT65965.1, or | SEQ ID NO: 20 |
| | NM_001556 XM_032491; | | NP_001547.1 | |
| NR1D1 | NM_021724 | SEQ ID NO: 21 | NP_068370.1 | SEQ ID NO: 22 |
| PNMT | NM_002686.3 | SEQ ID NO: 23 | NP_002677 | SEQ ID NO: 24 |
| PROSC | NM_007198 | SEQ ID NO: 25 | NP_009129.1 | SEQ ID NO: 26 |
| SPFH2 | AM393068 | SEQ ID NO: 27 | CAL37946.1 | SEQ ID NO: 28 |
| BRF2 | NM_018310 | SEQ ID NO: 29 | NP_060780.2 | SEQ ID NO: 30 |
| RAB11FIP1 | NM_001002814; | SEQ ID NO: 31 | NP_001002814.1 | SEQ ID NO: 32 |
| ASH2L | NM_004674; | SEQ ID NO: 33 | NP_004665.1 | SEQ ID NO: 34 |
| LSM1 | NM_014462; | SEQ ID NO: 35 | NP_055277.1 | SEQ ID NO: 36 |
| BAG4 | NM_004874 | SEQ ID NO: 37 | NP_004865.1 | SEQ ID NO: 38 |
| DDHD2 | NM_015214 XM_291291 | SEQ ID NO: 39 | NP_056029.1 | SEQ ID NO: 40 |
| WHSC1L1 | NM_023034 | SEQ ID NO: 41 | NP_075447.1 | SEQ ID NO: 42 |
| TACC1 | NM_206862 | SEQ ID NO: 43 | NP_996744.1 | SEQ ID NO: 44 |
| GOLGA7 | NM_016099 | SEQ ID NO: 45 | NP_057183.2 | SEQ ID NO: 46 |
| SLD5 | BC005995 | SEQ ID NO: 47 | AAH05995.1 | SEQ ID NO: 48 |
| MYST3 | NM_006766 | SEQ ID NO: 49 | NP_006757.1 | SEQ ID NO: 50 |
| AP3M2 | NM_006803 | SEQ ID NO: 51 | NP_006794.1 | SEQ ID NO: 52 |
| POLB | NM_002690 | SEQ ID NO: 53 | NP_002681.1 | SEQ ID NO: 54 |
| | | | AK018683 | |
| VDAC3 | NM_005662 | SEQ ID NO: 55 | NP_005653.3 | SEQ ID NO: 56 |
| SLC20A2 | NM_006749.3 | SEQ ID NO: 57 | NP_006740.1 | SEQ ID NO: 58 |
| THAP1 | NM_018105 | SEQ ID NO: 59 | NP_060575.1 | SEQ ID NO: 60 |
| LOC441347 | XM_940754 | SEQ ID NO: 61 | XP_945847.1 | SEQ ID NO: 62 |
| CCND1 | NM_053056 OR | SEQ ID NO: 63 | NP_444284.1 | SEQ ID NO: 64 |
| | NM_001758; | | | |
| FGF3 | NM_005247; | SEQ ID NO: 65 | NP_005238.1 | SEQ ID NO: 66 |
| FADD | CR456738 | SEQ ID NO: 67 | CAG33019.1 | SEQ ID NO: 68 |
| PPFIA1 | NM_003626; | SEQ ID NO: 69 | NP_003617.1 | SEQ ID NO: 70 |
| CTTN | NM_005231; | SEQ ID NO: 71 | NP_005222.2 | SEQ ID NO: 72 |
| NADSYN1 | NM_018161 | SEQ ID NO: 73 | NP_060631.2 | SEQ ID NO: 74 |
| KRTAP5-9 | NM_005553 | SEQ ID NO: 75 | NP_005544.4 | SEQ ID NO: 76 |
| FOLR3 | NM_000804 | SEQ ID NO: 77 | NP_000795.2 | SEQ ID NO: 78 |
| NEU3 | NM_006656.5 | SEQ ID NO: 79 | NP_006647.3 | SEQ ID NO: 80 |
| LHX1 | NM_005568.2 | SEQ ID NO: 81 | NP_005559.2 | SEQ ID NO: 82 |
| DDX52 | NM_007010.2 | SEQ ID NO: 83 | NP_008941.2 | SEQ ID NO: 84 |
| TBC1D3 | NM_032258.1 | SEQ ID NO: 85 | NP_115634.1 | SEQ ID NO: 86 |
| SOCS7 | NM_014598 XM_371052 | SEQ ID NO: 87 | NP_055413.1 | SEQ ID NO: 88 |
| PCGF2 | NM_007144.2 | SEQ ID NO: 89 | NP_009075.1 | SEQ ID NO: 90 |
| PSMB3 | NM_002795.2 | SEQ ID NO: 91 | NP_002786.2 | SEQ ID NO: 92 |
| PIP5K2B | NM_003559.4 | SEQ ID NO: 93 | NP_003550.1 | SEQ ID NO: 94 |
| FLJ20291 | AK000298.1 | SEQ ID NO: 95 | BAA91065 | SEQ ID NO: 96 |
| PPARBP | NM_004774.2 | SEQ ID NO: 97 | NP_004765.2 | SEQ ID NO: 98 |
| STARD3 | NM_006804.2 | SEQ ID NO: 99 | NP_006795.2 | SEQ ID NO: 100 |
| TCAP | NM_003673.2 | SEQ ID NO: 101 | NP_003664.1 | SEQ ID NO: 102 |
| PERLD1 | NM_033419 | SEQ ID NO: 103 | NP_219487.3 | SEQ ID NO: 104 |
| GRB7 | NM_001030002 | SEQ ID NO: 105 | NP_001025173.1 | SEQ ID NO: 106 |
| GSDML | NM_001042471; | SEQ ID NO: 107 | NP_001035936.1; | SEQ ID NO: 108 |
| | NM_018530 | SEQ ID NO: 109 | NP_061000.2 | SEQ ID NO: 110 |
| PSMD3 | NM_002809 | SEQ ID NO: 111 | NP_002800.2 | SEQ ID NO: 112 |
| ZNF217 | NM_006526 | SEQ ID NO: 113 | NP_006517.1 | SEQ ID NO: 114 |
| BCAS1 | NM_003657 | SEQ ID NO: 115 | NP_003648.1 | SEQ ID NO: 116 |
| CSTF1 | NM_001033521 | SEQ ID NO: 117 | NP_001028693.1 | SEQ ID NO: 118 |
| RAE1 | NM_003610 | SEQ ID NO: 119 | NP_003601.1 | SEQ ID NO: 120 |
| RNPC1 | NM_017495 | SEQ ID NO: 121 | NP_059965.2 | SEQ ID NO: 122 |
| PCK1 | AY794987 | SEQ ID NO: 123 | AAV50001.1 | SEQ ID NO: 124 |
| TMEPAI | NM_020182 | SEQ ID NO: 125 | NP_064567.2 | SEQ ID NO: 126 |
| RAB22A | NM_020673 | SEQ ID NO: 127 | NP_065724.1 | SEQ ID NO: 128 |
| VAPB | NM_004738 | SEQ ID NO: 129 | NP_004729.1 | SEQ ID NO: 130 |
| STX16 | NM_001001433 | SEQ ID NO: 131 | NP_001001433.1 | SEQ ID NO: 132 |
| NPEPL1 | NM_024663 or | SEQ ID NO: 133 | NP_078939.3 | SEQ ID NO: 134 |
| | NM_207402 | | | |
| GNAS | NM_000516 | SEQ ID NO: 135 | NP_000507.1 | SEQ ID NO: 136 |
| TH1L | NM_198976 | SEQ ID NO: 137 | NP_945327.1 | SEQ ID NO: 138 |
| N-PAC | NM_032569 NM_018459 | SEQ ID NO: 139 | NP_115958.2 | SEQ ID NO: 140 |
| C20orf45 | NR_003259 | SEQ ID NO: 141 | | |

[0071] GO analyses of those genes showed that they are involved in aspects of nucleic acid metabolism, protein modification, signaling and the cell cycle and/or protein transport and evidence is mounting that many if not most of these genes are functionally important in the cancers in which they are amplified and over expressed (see Table 3). Indeed, published functional studies in model systems already have implicated fourteen genes in diverse aspects of cancer pathophysiology (Table 3, column 8).

[0072] Six of these are encoded in the region of amplification at 8p11. These are the RNA binding protein, LSM1 (GenBank Accession No. NM_{—}014462; SEQ ID NO:35; Fraser et al., 2005), the receptor tyrosine kinase, FGFR1 (GenBank Accession No. AY585209; SEQ ID NO: 15; Braun and Shannon, 2004), the cell cycle regulatory protein, TACC1 (GenBank Accession No. NM_{—}206862; SEQ ID NO: 43; Still et al., 1999), the metalloproteinase, ADAM9 (GenBank Accession Nos. AF495383, NM_{—}003816, NM_{—}001005845; SEQ ID NOs: 3, 5, and 7; Mazzocca et al., 2005), the serine/threonine kinase, IKBKB (GenBank Accession Nos. AY663108, NM_{—}001556, XM_{—}032491; SEQ ID NO: 19; Greten and Karin, 2004; Lam et al., 2005) and the DNA polymerase, POLB (GenBank Accession No. NM_{—}002690, SEQ ID NO: 53; Clairmont et al., 1999).

[0073] Functionally validated genes in the region of amplification at 11q13 include the cell cycle regulatory protein, CCND1 (GenBank Accession Nos. NM_{—}053056, NM_{—}001758; SEQ ID NO: 63; Hinds et al., 1994), and the growth factor, FGF3 (GenBank Accession Nos. NM_{—}005247, SEQ ID NO: 65; Okunieff et al., 2003).

[0074] Functionally important genes in the region of amplification at 17q include the transcription regulation protein, PPARBP (GenBank Accession No. NM_{—}004774.2; SEQ ID NO: 97; Zhu et al., 2000), the receptor tyrosine kinase ERBB2 (GenBank Accession No. AY208911, NM_{—}004448, NM_{—}001005862; SEQ ID NOs: 9, 11, 13; Slamon et al., 1989) and the adapter protein, GRB7 (GenBank Accession No. NM_{—}001030002, SEQ ID NO: 105; Tanaka et al., 2000).

[0075] The AKT pathway-associated-transcription factor, ZNF217 (GenBank Accession No. NM_{—}006526; SEQ ID NO: 113; Huang et al., 2005; Nonet et al., 2001) and the RNA binding protein, RAE1 (GenBank Accession No. NM_{—}003610; SEQ ID NO: 119; Babu et al., 2003) are functionally validated genes encoded in the region of amplification at 20q13.

[0076] As set forth in Table 3, column 9, further support for the functional importance of 21 of these genes (TACC1, ADAM9, IKBKB, POLB, CCND1, PCGF2, PSMB3, PIP5K2B, FLJ20291, STARD3, TCAP, PNMT, PERLD1, GRB7, GSDML, PSMD3, NR1D1, ZNF217, BCAS1, TH1L, and C20orf45) in oncogenesis comes from the observation that they are within 100 Kbp of sites of recurrent tumorigenic viral integration in the mouse (Akagi et al., 2004); in particular, three (IKBKB, CCND1, GRB7) are within 10 Kbp of such a site. Taking proximity to a site of recurrent tumorigenic viral integration as evidence for a role in cancer genesis, an additional 13 genes or transcripts are implicated (see Table 3); these are the genes that are near viral insertion sites but are: (1) not associated with outcome [highlighted gray] and (2) not previously associated to cancer [column 8].

[0077] The biological roles of the genes deregulated by recurrent high level amplification are diverse and vary between regions of amplification. For example, genes deregulated by amplification at 11q13 and 17q11-12 predominantly involved signaling and cell cycle regulation while genes deregulated by amplification at 8p11-12 and 20q13 were of mixed function but were associated most frequently with aspects of nucleic acid metabolism. The predominance of genes involved in nucleic acid metabolism in the region of amplification at 8p11-12 was especially strong.

[0078] Gene Deletion. Interestingly, the region of recurrent amplification at 8p11-12 described above was reduced in copy number in some tumors and this event also was associated with poor outcome. Thus, this is evidence that the poor clinical outcome in tumors with 8p11-12 abnormalities is due to increased genome instability/mutagenesis resulting from either up- or down-regulation of genes encoded in this region. This is supported by studies in yeast showing that up- or down-regulation of genes involved in chromosome integrity and segregation can produce similar instability phenotypes (Ouspenski et al., 1999).

### Therapeutic Targets

[0079] Thus, the 66 genes we set forth in Table 3 were found to be deregulated by the high level amplifications and were associated with poor outcome; these genes and their gene products serve as therapeutic targets for cancer treatment, in particular those patients that are refractory to current therapies. Small molecule or antibody based inhibitors have already been developed for FGFR1 (PD173074, (Ray et al., 2004)), IKBKB (PS-1145; (Lam et al., 2005)) and ERBB2 (Trastuzumab, (Vogel et al., 2002)).

[0080] Six genes set forth in Table 3 (PROSC, ADAM9, FNTA, ACACA, PNMT, and NR1D1) are considered as druggable based on the presence of predicted protein folds that favor interactions with drug-like compounds (Russ and Lampel, 2005).

[0081] Taking ERBB2 as the paradigm (recurrently amplified, over expressed, associated with outcome and with demonstrated functional importance in cancer), indicates that FGFR1, TACC1, ADAM9, IKBKB, PNMT, and GRB7 are high priority therapeutic targets in these regions of amplification. Thus, it is expected that the studies and effects of inhibition on ADAM9, as described in Example 10, may be carried out and observed for any of these genes as well. Furthermore, it is contemplated that antagonists of these genes can be made by one having skill in the art, including but not limited to, inhibitory oligonucleotides and peptides, aptamers, small molecules, drugs and antibodies, thereby producing an effect on the gene or gene product as a treatment for breast cancer.

### Molecular Characteristics and Associations.

[0082] We assessed genome copy number using BAC array CGH (Hodgson et al., 2001; Pinkel et al., 1998; Snijders et al., 2001; Solinas-Toldo et al., 1997) and gene expression profiles using Affymetrix U133A arrays (Ramaswamy et al., 2003; Reyal et al., 2005) in breast tumors from a cohort of patients treated according to the standard of care between 1989 and 1997 (surgery, radiation, hormonal therapy and treatment with high dose adriamycin and cytoxan as indicated). We measured genome copy number profiles for 145 primary breast tumors and gene expression profiles for 130 primary tumors, of which 101 were in common. We analyzed these data to identify recurrent genomic and transcriptional abnormalities and we assessed associations with clinical endpoints to identify genomic events that might contribute to cancer pathophysiology.

[0083] Genome copy number and gene expression features. We found that the recurrent genome copy number and gene expression characteristics measured for the patient cohort in this study were similar to those reported in earlier studies. We summarize these briefly.

[0084] FIG. 1(a) and FIG. 1(b) show numerous regions of recurrent genome CNA and 9 regions, as shown in Table 1, of recurrent high level amplification involving regions of chromosomes 8, 11, 12, 17 and 20 while FIG. 2 shows that analysis of these data using unsupervised hierarchical clustering resolves these tumors into the “1q/16q” (or “simple”), “complex” and “amplifier” genome aberration subtypes (Fridlyand et al., 2006). The genomic extents of the regions of amplification are listed in Table 1. These were generally similar to those reported in earlier studies using chromosome (Kallioniemi et al., 1994) and array CGH (Loo et al., 2004; Naylor et al., 2005; Pollack et al., 1999; Pollack et al., 2002). Several of these regions of amplification were frequently co-amplified. Declaring a Fisher exact test p-value of less than 0.05 for pair-wise associations to be suggestive of possible significant co-amplification, we found co-amplification of 8q24 and 20q13 and co-amplification of regions at 11q13-14, 12q13-14, 17q11-12, and 17q21-24. These analyses were underpowered to achieve significance with proper correction for multiple testing so these associations are suggestive but not significant. However, these associations were consistent with the report of Al Kuraya et al (Al-Kuraya et al., 2004) who showed evidence for co-amplification of genes in several of these regions of amplification including ERBB2, MYC, CCND1 and MDM2 and that of Naylor et al (Naylor et al., 2005) showing co-amplification of 17q12 and 17q25.

[0085] FIG. 6 shows that unsupervised hierarchical clustering of intrinsically variable genes resolves the tumors in our study cohort into the luminal A, luminal B, basal-like and ERBB2 expression subtypes previously reported for breast tumors (Perou et al., 1999; Perou et al., 2000; Sorlie et al., 2003). We assessed the genomic characteristics of these expression subtypes in subsequent analyses.

[0086] Associations between CNAs and expression. Combined analyses of genome copy number and expression showed that the recurrent genome CNAs differed between expression subtypes and identified genes whose expression levels were significantly deregulated by the CNAs. FIGS. 1(c)-1(j) show the recurrent CNAs for each expression subtype. In these analyses, we assigned each tumor to the expression subtype cluster (basal-like, ERBB2, luminal A, and luminal B) to which its expression profile was most highly correlated. We did not assess aberration in normal-like tumors due to the small number of such tumors.

[0087] FIG. 1(c) shows that the basal-like tumors were relatively enriched for low-level copy number gains involving 3q, 8q, and 10p and losses involving 3p, 4p, 4q, 5q, 12q, 13q, 14q and 15q while FIG. 1(d) shows that high level amplification at any locus was infrequent in these tumors. FIG. 1(e) shows that ERBB2 tumors were relatively enriched for increased copy number at 1q, 7p, 8q, 16p and 20q and reduced copy number at 1p, 8p, 13q and 18q. FIG. 1(f) shows that amplification of ERBB2 was highest in the ERBB2 subtype as expected but amplification of noncontiguous, distal regions of 17q also was frequent as previously reported (Barlund et al., 1997). FIG. 1(g) shows that increased copy number at 1q and 16p and reduced copy number at 16q were the most frequent abnormalities in luminal A tumors while FIG. 1(h) shows that amplifications at 8p11-12, 11q13-14, 12q13-14, 17q11-12, 17q21-24 and 20q13 were relatively common in this subtype. FIG. 1(i) shows that gains of chromosomes 1q, 8q, 17q and 20q and losses involving portions of 1p, 8p, 13q, 16q, 17p and 22q were prevalent in luminal B tumors while FIG. 1(j) shows that high level amplifications involving 8p11-12, two regions of 8q, and 11q13-14 were frequent.

[0088] In order to understand how the genome aberrations were influencing cancer pathophysiologies, we identified genes that were deregulated by recurrent genome CNAs. We took these genes to be those whose expression levels were significantly associated with copy number (Holm-adjusted p-value <0.05). These genes, which represent about 10% of the genome interrogated by the Affymetrix HGU133A arrays used in this study, and their copy number-expression level correlation coefficients are listed in Table 4 This extent of genome-aberration-driven deregulation of gene expression is similar to that reported in earlier studies (Hyman et al., 2002; Pollack et al., 1999).

[0089] We tested associations between copy number and expression level for 186 genes in regions of amplification at 8p11-12, 11q13-q14, 17q11-12 and 20q13 (see Table 5) and we identified 66 genes in these regions whose expression levels were correlated with copy number (FDR<0.01, wilcoxon rank sum test; Table 3). These genes define the transcriptionally important extents of the regions of recurrent amplification. Twenty-three were from a 5.5 Mbp region at 8p11-12 flanked by SPFH2 and LOC441347, ten were from a 6.6 Mbp region at 11q13-14 flanked by CCND1 and PRKRIR, nineteen were from a 3.1 Mbp region at 17q12 flanked by LHX1 and NR1D1 and fourteen were from a 5.4 Mbp region at 20q13 flanked by ZNF217 and C20orf45.

[0090] Since the recurrent genome aberrations differed between expression subtypes, we explored the extent to which the expression subtypes were determined by genome copy number. Specifically, we applied unsupervised hierarchical clustering to intrinsically variable genes after removing genes whose expression levels were correlated with copy number. FIG. 4 shows that the tumors still resolve into the basal-like and luminal classes. However, the ERBB2 cluster was lost.

Associations with Clinical Variables.

[0091] Associations with histopathology. FIG. 2 and Table 2 summarize associations of histopathological features with aspects of genome abnormality including recurrent genome abnormalities, total number of copy number transitions, fraction of the genome altered (FGA), number of chromosomal arms containing at least one amplification, number of recurrent amplicons and presence of at least one recurrent amplification.

[0092] These analyses showed that ER/PR negative tumors were predominantly found in the basal-like and “complex” expression and genome aberration subtypes, respectively. Node-positive tumors had significantly more amplified arms and recurrent amplicons than node-negative samples but showed a much more moderate difference in terms of low-level copy number transitions. Stage 1 tumors had moderately fewer low- and high-level changes than higher stage tumors. The number of low and high level abnormalities increased with SBR grade. Interestingly, the “complex” tumors showing many low-level abnormalities were more strongly associated with aberrant p53 expression than “amplifying” tumors. “Simple” tumors tended to have Ki67 proliferation indices<10% while “complex” and “amplifying” tumors typically had Ki67 indices>10%. The number of amplifications increased significantly with tumor size but the number of low level changes did not. We observed no association of genomic changes with the age at diagnosis.

[0093] Associations with outcome. FIG. 4 and Table 5 summarize associations between histopathological, transcriptional and genomic characteristics and outcome endpoints identified using multivariate regression analysis. Histopathological features including size and nodal status were significantly associated with survival duration and/or disease recurrence in univariate analyses (Table 4) and were included in the multivariate regressions described below.

[0094] The tumor subtypes based on patterns of gene expression or genome aberration content showed moderate associations with outcome endpoints. For example, FIG. 3(a) shows that patients with tumors classified as ERBB2 based on expression pattern had significantly shorter disease-specific survival than patients classified as luminal A, luminal B, or normal-like as previously reported (Perou et al., 2000; Sorlie et al., 2001). Unlike these earlier reports, patients with tumors classified as basal-like did not do significantly worse than patients with luminal or normal breast-like tumors although there was a trend in that direction. In addition, FIG. 3(b) indicates that patients with tumors classified as “1q/16q” based on genome aberration content tended to have longer disease-specific survival than patients with “complex” or “amplifier” tumors.

[0095] We found that high level amplification was most strongly associated with poor outcome in this aggressively treated patient population. Amplification at any of the 9 recurrent amplicons was an independent risk factor for reduced survival duration (p<0.04) and distant recurrence (p<0.01) in a multivariate Cox-proportional model that included tumor size and nodal status. FIG. 3(c), for example, shows that patients whose tumors had at least one recurrent amplicon survived a significantly shorter time than did patients with tumors showing no amplifications. More specifically, amplifications of 8p11-12 or 17q11-12 (ERBB2) were significantly associated with disease-specific survival and distant recurrence in all patients in multivariate regressions (Table 1).

[0096] Importantly, we found that stratification according to amplification status allowed identification of patients with poor outcome even within an expression subtype. FIG. 3(d), for example, shows that patients with luminal A tumors and amplification at 8p11-12, 11q13-14 or 20q13 had significantly shorter disease-specific survival than patients without amplification in one of these regions (the number of samples in the luminal A subtype group was too small for multivariate regressions). Amplification at 8p11-12 was most strongly associated with distant recurrence in the luminal A subtype.

[0097] Considering the strong association between amplification and outcome, we explored the possibility that some of these genes were over expressed in tumors in which they were not amplified and that over expression was associated with reduced survival duration in those tumors. Increased expression levels of 7 genes are labeled in Table 3 in dark gray (CTTN, KRTAP5-9, LHX1, PPARBP, PNMT, GRB7, TMEPAI). These genes were associated with reduced survival or distant recurrence at the p<0.1 level but only two, the growth factor receptor binding protein, GRB7 (17q) and the keratin associated protein, KTRAP5-9 (11q), at the p<0.05 level.

[0098] Interestingly, this expression analysis also revealed an unexpected association between reduced expression levels of genes from regions of amplification and poor outcome (either disease free survival or distant recurrence) in tumors without relevant amplifications (p<0.05). This was especially prominent for genes from the region of amplification at 8p11-12 (14 of 23 genes in this region showed this association) while only two genes from regions of adverse-outcome-associated amplifications on chromosomes 17q and 20q showed this association.

[0099] Following this lead, we tested associations between outcome and reduced copy number at 8p11-12 in patients in tumors in which 8p11-12 was not amplified. FIG. 3(e) shows that patients with reduced copy number at 8p11-12 did worse than patients without a deletion in this region. FIG. 3(f) shows that patients in the overall study with high level amplification or deletion at 8p11-12 survived significantly shorter survival (p=0.0017) than patients without either of those events.

[0100] We also tested for associations of low level genome copy number changes with the outcome endpoints. The most frequent low-level copy number changes (e.g. increased copy number at 1q, 8q and 20q or decreased copy number at 16q) were not significantly associated with outcome endpoints. However, we did find a significant association of the loss of a small region on 9q22 with adverse outcome, both disease-specific survival and distal recurrence, which persisted even after correction for multiple testing (p<0.05, multivariate Cox regression). This region is defined by BACs, CTB-172A10 and RP11-80F13. We also found a marginally significant association between fraction of the genome lost and disease-specific survival in luminal A tumors (p<0.02 and <0.06 for univariate and multivariate regression, respectively, Wilcoxon rank-sum test).

[0101] The lack of association of the most frequent low level CNAs with outcome raised the issue of selection pressure during tumor evolution. To understand this, we used the program GoStat (Beissbarth and Speed, 2004) to identify the Gene Ontology (GO) classes of 1444 unique genes (1734 probe sets) whose expression levels were preferentially modulated by low-level CNAs compared to 3026 probe sets whose expression levels did not show associations with copy number. The GO categories most significantly overrepresented in the set of genes with a dosage effect compared to genes with no or minimal dosage effect involved RNA processing (Holm adjusted p-value<0.001), RNA metabolism (p<0.01) and cellular metabolism (p<0.02).

### EXAMPLES

### Example 1

### Tumor Characteristics

[0102] Frozen tissue from UC San Francisco and the California Pacific Medical Center collected between 1989 and 1997 was used for this study. Tissues were collected under IRB approved protocols with patient consent. Tissues were collected, frozen over dry ice within 20 minutes of resection, and stored at −80° C. An H&E section of each tumor sample was reviewed, and the frozen block was manually trimmed to remove normal and necrotic tissue from the periphery. Clinical follow-up was available with a median time of 6.6 years overall and 8 years for censored patients. Tumors were predominantly early stage (83% stage I & II) with an average diameter of 2.6 cm. About half of the tumors were node positive, 67% were estrogen receptor positive, 60% received tamoxifen and half received adjuvant chemotherapy (typically adriamycin and cytoxan). Clinical characteristics of the individual tumors are provided together with expression and array CGH profiles in the CaBIG repository and at http://graylabdata.lbl.gov.

### Example 2

### Array CGH

[0103] Each sample, such as from Example 1, was analyzed using Scanning and OncoBAC arrays. Scanning arrays were comprised of 2464 BACs selected at approximately megabase intervals along the genome as described previously (Hodgson et al., 2001; Snijders et al., 2001). OncoBAC arrays were comprised of 1860 PI, PAC, or BAC clones. About three-quarters of the clones on the OncoBAC arrays contained genes and STSs implicated in cancer development or progression. All clones were printed in quadruplicate. DNA samples for array CGH were labeled generally as described previously (Hackett et al., 2003; Hodgson et al., 2001; Snijders et al., 2001). Briefly, 500 ng each of cancer and normal female genomic DNA sample was labeled by random priming with CY3- and CY5-dUTP, respectively; denatured; and hybridized with unlabeled Cot-1 DNA to CGH arrays. After hybridization, the slides were washed and imaged using a 16-bit CCD camera through CY3, CY5, and DAPI filters (Pinkel et al., 1998).

[0104] Statistical considerations. Data processing. Array CGH data image analyses were performed as described previously (Jain et al., 2002). In this process, an array probe was assigned a missing value for an array if there were fewer than 2 valid replicates or the standard deviation of the replicates exceeded 0.2. Array probes missing in more than 50% of samples in OncoBAC or Scanning array datasets were excluded in the corresponding set. Array probes representing the same DNA sequence were averaged within each dataset and then between the two datasets. Finally, the two datasets were combined and the array probes missing in more than 25% of the samples, unmapped array probes and probes mapped to chromosome Y were eliminated. The final dataset contained 2149 unique probes.

### Example 3

### Expression Profiling Using the Affymetrix High Throughput Analysis (HTA) System

[0105] Expression array analysis using the GeneChip® assay is implemented on the Affymetrix HTA system in four automated procedures; target preparation, hybridization, washing/staining and scanning.

[0106] Target preparation. For each sample, the RNA target is prepared by putting 2.5 g of total RNA in 5 μl water and 5 μl of 10 μM T7(dt)24 primer into a MJ Research 96-well reaction plate. The total RNA undergoes an annealing step at 70° C. for 10 minutes followed by a 4° C. cooling step for 5 minutes. The plate is transferred back to the deck position and undergoes first strand cDNA synthesis. 10 μl of First Strand Cdna Synthesis cocktail (4 μl of Affymetrix 5×1 st strand buffer (250 mM Tris-HCl, pH 8.3 at room temperature; 375 mM KCl; 15 mM MgCl2), is mixed with 2 μl 0.1M DTT, 1 μl 10 mM dNTP mix, 1 μl Superscript II (200U/ul), and 2 μl nuclease free water per reaction) is added, and the plate is then transferred to the thermal cycler and incubated at 42° C. for 60 minutes and 4° C. for 5 min. 91 μl of nuclease free water and 39 μl of the Second Strand cDNA Synthesis cocktail (30 μl of Affymetrix 5×2nd strand buffer, 100 mM Tris-HCl (pH 6.9), 23 mM MgCl2, 450 mM KCl, 0.75 mM β-NAD, 50 mM (NH4)2SO4); 3 μl 10 mM dNTP; 1 μl 10 unit/μl DNA Ligase; 4 μl 10 unit/μl DNA Polymerase and 1 μl 2 units/μl RNase H) is added. The plate is incubated at 16° C. for 120 minutes and 4° C. for 5 minutes. 4 μl of T4 Polymerase cocktail comprised of 2 μl T4 DNA Polymerase plus 2 μl 1× T4 DNA Polymerase Buffer (165 mM Tris-acetate (pH 7.9), 330 mM Sodium-acetate, 50 mM Magnesium-acetate, 5 mM DTT) is added and the plate is taken back to the thermal cycler where it is cycled at 16° C. for 10 minutes, 72° C. for 10 minutes, and cooled to 4° C. for 5 minutes.

[0107] The plate is transferred back to the deck and Agencourt Magnetic Beads are used for the cDNA clean-up. 162 μl of magnetic beads are mixed with 90 μl of in the cDNA Clean-Up Plate and incubated for 5 minutes. Post incubation, the cDNA bound to the beads in the cDNA Clean-Up Plate is moved to the Agencourt magnetic plate. Another 115 μl of magnetic beads is mixed with 64 μl cDNA incubated for 5 minutes, and then moved to the Agencourt magnetic plate. Post incubation, the supernatant is removed and two washes with 75% EtOH are performed using 200 μl solution. The EtOH is then removed and the beads sit for 5 minutes. 40 μl of nuclease free water is added to the beads and mixed well. The solution is then incubated for 1 minute, and then it is taken back to the magnetic plate where it is incubated for 5 minutes to capture the beads on the magnet. 22 μl of eluted cDNA is then transferred to the Purified cDNA Plate (22 μl total volume). 38 μl of IVT cocktail (6 μl 10× IVT Buffer, 18 μl HTA RLR Reagent (labeling NTP), 6 μl HTA Enzyme Mix, 1 μl T7 RNA Polymerase, and 7 μl RNase free water per reaction is added to the purified cDNA) is added to the 22 μl of purified cDNA (60 μl total volume). The plate is then transferred to the thermal cycler where incubation of 8 hours at 37° C. occurs.

[0108] Upon completion, the plate is transferred back to the deck where 120 μL Agencourt Magnetic Beads are used to clean up the cRNA product. The A260 of the purified cRNA is measured in a plate spectrophotometer, then the concentration in each well of a 96 well plate is adjusted to a calculated value of 0.625 μg/μl. A second reading is taken to verify the normalization process. 30 μl of cRNA was transferred from the cRNA Normalization Plate and dispensed in the Fragmented cRNA Plate. 7.5 μl of 5× fragmentation buffer per sample is added. The plate is then transferred to the thermal cycler where it is held at 94° C. for 35 minutes followed by a cooling step at 20° C. for 5 minutes. The sample is then mixed with 90 μl of hybridization cocktail (3 μl of 20× bioB, bioC, bioD, and creX hybridization controls mixed with 1.6 μl 3 nM oligo-B2, 1 μl 10 mg/ml Herring sperm DNA, 1 μl 50 mg/ml acetylated BSA, and 83.4 μl 1.2× Hybridization Buffer).

[0109] Hybridization. The sample is then ready to be hybridized. The peg array plate is incubated in 60 μl pre-hybridization cocktail (1 μl 10 mg/ml Herring sperm DNA, 1 μl 150 mg/ml Acetylated BSA, 84 μl Hybridization buffer, 15 μl nuclease free H20 per reaction). The hybridization-ready sample is taken to the thermal cycler and denatured for 95° C. for 5 minutes. Upon completion of this step, the plate is returned to the deck where 70 μl of sample is transferred to a hybridization tray. The peg plate is then lifted off of the pre-hybridization tray and taken to the hybridization plate where it is placed. This “hybridization sandwich” is then manually transferred to a hybridization oven where it incubates at 48° C. for 16-18 hours. Washing/Staining. The robot lifts the peg plate off of the hybridization tray and transfers it to the first low stringency wash (LSW) (6×SSPE, 0.01% Tween-20) where it is dipwashed 36 times. The plate is then transferred to the other three low stringency wash positions where the dipping is repeated. The peg plate is then moved to the high stringency wash (HSW) (100 mM MES, 0.1M NaCl, 0.01% Tween-20) where it is incubated at 41° C. for 25 minutes. After the incubation, the peg plate is transferred to a fifth LSW tray where the HSW removed by rinsing. The plate is transferred to the first stain (31.5 μl nuclease free H20, 35 μl 2×MES stain buffer, 2.8 μl 50 mg/ml Acetylated BSA, 0.7 μl R-Phycoerythrin Streptavidin), where it incubates at room temperature for 10 minutes. At the end of the 10 minute incubation, the peg plate undergoes another 4 cycles of dip washing method. The peg tray is then transferred to stain 2 (2.8 μl 50 mg/ml Acetylated BSA, 0.7 μl reagent grade goat IgG, 0.4 μl biotinylated goat Anti-streptavidin antibody per reaction). The above method is repeated for stain 3 (31.5 μl nuclease free H20, 35 μl 2×MES stain buffer, 2.8 μl 50 mg/ml Acetylated BSA, 0.7 μl R-Phycoerythrin Streptavidin). At the end of the incubation of the third stain, the peg plate is washed 36 times in LSW. The robot then transfers 70 μl of MES holding buffer, 68 mM MES, 1.0 M NaCl, 0.01% Tween-20, into a sterile scan tray. The peg tray is then placed into the scan tray for scanning.

[0110] Scanning. The 96 well peg plate is scanned by the Affymetrix High Throughput (HT) scanner, a fully automated epi-fluorescence imaging system with an excitation wavelength range of 340 nm to 675 nm and a cooled 1280×1024 CCD camera with 12 bit readout. Scanning resolution is 1.0 μm/pixel with a 10× objective. Images are captured at two different exposure times. Each well will have 49 sub-images/exposure times. The software program then converts these .dat files into mini .cel files and then into composite cel files where the information is analyzed in the Affymetrix GCOS 1.2 software.

[0111] Statistical considerations. Data processing. For Affymetrix data, multi-chip robust normalization was performed using RMA software (Irizarry et al., 2003). Transcripts assessed on the arrays were classified into two groups using Gaussian model-based clustering by considering the joint distribution of the median and standard deviation of each probe set across samples. During this process, computational demands were reduced by randomly sampling and clustering 2000 probe intensities using melust (Yeung et al., 2001; Yeung et al., 2004) with two clusters and unequal variance. Next, the remaining probe intensities were classified into the newly created clusters using linear discriminant analysis. The cluster containing probe intensities with smaller mean and variance was defined as “not expressed” and the second cluster was “expressed”.

### Example 4

### Assessment of Genome Copy Numbers

[0112] Characterizing copy number changes. The array CGH data were analyzed using circular binary segmentation (CBS) (Olshen et al., 2004) to translate intensity measurements into regions of equal copy number as implemented in the DNA copy R/Bioconductor package. Missing values for probes mapping within segmented regions of equal copy number were imputed by using the value of the corresponding segment. A few probes with missing values (<0.3%) were located between segmented regions and their values were imputed using the maximum value of the two flanking segments. Thus, each probe was assigned a segment value referred to as its “smoothed” value. The scaled median absolute deviation (MAD) of the difference between the observed and smoothed values was used to estimate the tumor-specific experimental variation. All tumors had noise standard deviation of less than 0.2. The gain and loss status for each probe was assigned using the merge Level procedure as described (Willenbrock and Fridlyand, 2005). In this process, segmental values across the genome were merged to create a common set of copy number levels for each individual tumor. The probes corresponding to the copy number level with the smallest absolute median value were declared unchanged whereas all the other probes were either gained or lost depending on the sign of the segment mean. Additionally, to account for high level focal aberrations being single outliers and thus assigned the status of the surrounding segments, the probe was assigned gain status when amplified as described below.

[0113] The frequency of alterations at each probe locus was computed as the proportion of samples showing an aberration at that locus. The genome distance assigned to each probe was computed by assigning a genomic distance equal to half the distance to the neighboring probes or to the end of a chromosome for the probes with only one neighbor. The number of copy number transitions was computed based on the initial DNA copy segmentation by counting the number of copy number transitions in the genome (Snijders et al., 2003). Single outliers such as high level amplifications were identified by assigning the original observed log2ratio to the probes for which the observed values were more than 4 tumor-specific MAD away from the smoothed values. The amplification status for a probe was then determined by considering the width of the segment to which that probe belonged (0 if an outlier) and a minimum difference between the smoothed value of the probe (observed value if an outlier) and the segment means of the neighboring segments. The clone was declared amplified if it belonged to the segment spanning less than 20 Mb and the minimum difference was greater than exp(−x³) where x is the final smoothed value for the clone. Note that this allowed clones with small log2ratio to be declared amplified if they were high relative to the surrounding clones with the required difference becoming larger as value of the clone gets smaller (e.g. a difference of 1 was required when clone value was 0 and 0.36 when the clone value was 1; Albertson, Fridlyand, private communication).

[0114] Clustering of genome copy number profiles. Genome copy number profiles were clustered using smoothed imputed data with outliers present. Agglomerative hierarchical clustering with Pearson correlation as a similarity measure and the Ward method to minimize sum of variances were used to produce compact spherical clusters (Hartigan, 1975). The number of groups was assessed qualitatively by considering the shape of the clustering dendogram.

[0115] Expression subtype assignment. Tumors were classified according to expression phenotype (basal, ERBB2, luminal A, luminal B and normal-like) by assigning each tumor to the subtype of the cluster defined by hierarchical clustering of expression profiles for 122 samples published by Sorlie et al (Sorlie et al., 2003) to which it had the highest Pearson correlation. The correlation was computed using the subset of Stanford intrinsically variable genes common to both datasets. Unigene IDs were used to match the probes and genes with non-unique Unigene IDs. These data were averaged and the genes were median-centered for both datasets. For robustness, only 79 of the most tightly clustered Stanford samples were used to define Stanford cluster centroids. Unigene IDs for Affymetrix data were obtained from the TIGR Resourcer website, http://pga.tigr.org/tigr-scripts/magic/rl.pl. The Stanford intrinsic genes list was downloaded from http://genome-www.stanford.edu/breast_cancer/robustness/data.shtml. The same procedure was used to assign expression subtypes to the 295 breast tumors dataset published by van de Vijver et al., (van de Vijver et al., 2002) downloaded from http://www.rii.com/publications/2002/default.html except that matching was done directly using gene names.

[0116] Association of copy number with survival. Stage 4 samples were excluded from all the outcome-related analyses; and disease-specific survival and time to distant recurrence were used as the two endpoints. We identified clinical variables independently associated with outcome endpoints by first using univariate Cox-proportional hazards model to identify clinical variables individually associated with the outcomes and then identifying the subset of variables significant in the additive multivariate model which included all significant variables from univariate analyses. Significance was declared at the 0.05 level. As demonstrated in (Willenbrock and Fridlyand, 2005), analyzing segmented data greatly increases power to detect true significant associations without increasing the false positive rate. Therefore, we used smoothed imputed data with outliers as described above to identify significant associations of low-level copy number changes with outcome endpoints. P-values were adjusted using False Discovery Rate (FDR) and a genome association was considered significant if its FDR was less than 0.05. A Cox proportional model also was used to associate the total number of copy number transitions and amount of genome gained and lost with survival; overall and within expression subtypes. P-values were not adjusted for FDR for these two analyses due to their targeted nature and significance was declared at the 0.05 level.

[0117] Regions of high level amplification were declared recurrent when present in at least 5 samples. The BAC array probes were further manually grouped to form groups of contiguous regions thereby referred to as amplicons, and singletons were excluded. Each sample was further classified as amplified for a given amplicon if it contained at least one amplified probe in the amplicon region. We tested all amplicons for association with the outcome variables by fitting univariate and multivariate Cox-proportional models with and without clinical variables and assessing significance of the standardized Cox-proportional coefficient. Significance was declared at unadjusted p-value<0.05.

[0118] Association of copy number with expression. The presence of an overall dosage effect was assessed by subdividing each chromosomal arm into non-overlapping 20 Mb bins and computing the average of cross-Pearson-correlations for all gene transcript-BAC probe pairs that mapped to that bin. We also calculated Pearson correlations and corresponding p-values between expression level and copy number for each gene transcript. Each transcript was assigned an observed copy number of the nearest mapped BAC array probe. 80% of gene transcripts had a nearest clone within 1 Mbp and 50% had a clone within 400 kbp. Correlation between expression and copy number was only computed for the gene transcripts whose absolute assigned copy number exceeded 0.2 in at least 5 samples. This was done to avoid spurious correlations in the absence of real copy number changes. We used conservative Holm p-value adjustment to correct for multiple testing. Gene transcripts with an adjusted p-value<0.05 were considered to have expression levels that were highly significantly affected by gene dosage. This corresponded to a minimum Pearson correlation of 0.44.

[0119] Associations of transcription and CNA in regions of amplification with outcome in tumors without particular amplicons. We assessed the associations of levels of transcripts in regions of amplifications with survival or distant recurrence in tumors without amplifications in order to find genes that might contribute to progression when deregulated by mechanisms other than amplification (e.g. we assessed associations between expression levels of the genes mapping to the 8p11-12 amplicon and survival in samples without 8p11-12 amplification. We performed separate cox-proportional regressions for disease-specific survival and distant recurrence. Stage 4 samples were excluded from all analyses. Testing for functional enrichment. We used the gene ontology statistics tool, GoStat (Beissbarth and Speed, 2004) to test whether gene transcripts with strongest dosage effects were enriched for particular functional groups. The p-values were adjusted using False Discovery Rate. The categories were considered significantly overrepresented if the FDR-adjusted p-value was less than 0.001. Since expressed genes were significantly more likely to show dosage effects than non expressed genes (p-value<2.2e-16, Wilcoxon rank sum test), GoStat comparisons were performed only for expressed genes. Specifically, GO categories for 1734 expressed probes with significant dosage effect (Holm p-value<0.05) were compared with those for 3026 expressed probes with no dosage effect (Pearson correlation<0.1).

### Example 5

### Probe Preparation

[0120] Methods of preparing probes are well known to those of skill in the art (see, e.g. Sambrook et al., Molecular Cloning: A Laboratory Manual (2nd ed.), Vols. 1-3, Cold Spring Harbor Laboratory, (1989) or Current Protocols in Molecular Biology, F. Ausubel et al., ed. Greene Publishing and Wiley-Interscience, New York (1987)), which are hereby incorporated by reference.

[0121] Prior to use, constructs are fragmented to provide smaller nucleic acid fragments that easily penetrate the cell and hybridize to the target nucleic acid. Fragmentation can be by any of a number of methods well known to hose of skill in the art. Preferred methods include treatment with a restriction enzyme to selectively cleave the molecules, or alternatively to briefly heat the nucleic acids in the presence of Mg²⁺. Probes are preferably fragmented to an average fragment length ranging from about 50 bp to about 2000 bp, more preferably from about 100 bp to about 1000 bp and most preferably from about 150 bp to about 500 bp.

[0122] Methods of labeling nucleic acids are well known to those of skill in the art. Preferred labels are those that are suitable for use with in situ hybridization. The nucleic acid probes may be detectably labeled prior to the hybridization reaction. Alternatively, a detectable label which binds to the hybridization product may be used. Such detectable labels include any material having a detectable physical or chemical property and have been well-developed in the field of immunoassays.

[0123] As used herein, a “label” is any composition detectable by spectroscopic, photochemical, biochemical, immunochemical, or chemical means. Useful labels in the present invention include radioactive labels (e.g, ³²P, ¹²⁵I, ¹⁴C, ³H, and ³⁵S), fluorescent dyes (e.g. fluorescein, rhodamine, Texas Red, etc.), electron-dense reagents (e.g. gold), enzymes (as commonly used in an ELISA), calorimetric labels (e.g. colloidal gold), magnetic labels (e.g. DYNABEADS™), and the like. Examples of labels which are not directly detected but are detected through the use of directly detectable label include biotin and dioxigenin as well as haptens and proteins for which labeled antisera or monoclonal antibodies are available.

[0124] The particular label used is not critical to the present invention, so long as it does not interfere with the in situ hybridization of the stain. However, stains directly labeled with fluorescent labels (e.g. fluorescein-12-dUTP, Texas Red-5-dUTP, etc.) are preferred for chromosome hybridization.

[0125] A direct labeled probe, as used herein, is a probe to which a detectable label is attached. Because the direct label is already attached to the probe, no subsequent steps are required to associate the probe with the detectable label. In contrast, an indirect labeled probe is one which bears a moiety to which a detectable label is subsequently bound, typically after the probe is hybridized with the target nucleic acid.

[0126] In addition the label must be detectable in as low copy number as possible thereby maximizing the sensitivity of the assay and yet be detectible above any background signal. Finally, a label must be chosen that provides a highly localized signal thereby providing a high degree of spatial resolution when physically mapping the stain against the chromosome. Particularly preferred fluorescent labels include fluorescein-12-dUTP and Texas Red-5-dUTP.

[0127] The labels may be coupled to the probes in a variety of means known to those of skill in the art. In a preferred embodiment the nucleic acid probes will be labeled using nick translation or random primer extension (Rigby, et al. J. Mol. Biol., 113: 237 (1977) or Sambrook, et al., Molecular Cloning—A Laboratory Manual, Cold Spring Harbor Laboratory, Cold Spring Harbor, N.Y. (1985)).

[0128] One of skill in the art will appreciate that the probes of this invention need not be absolutely specific for the targeted 8p11-12, 11q13-14, 17q11-12 or 20q13 regions of the genome. Rather, the probes are intended to produce “staining contrast”. “Contrast” is quantified by the ratio of the probe intensity of the target region of the genome to that of the other portions of the genome. For example, a DNA library produced by cloning a particular chromosome (e.g. chromosome 7) can be used as a stain capable of staining the entire chromosome. The library contains both sequences found only on that chromosome, and sequences shared with other chromosomes. Roughly half the chromosomal DNA falls into each class. If hybridization of the whole library were capable of saturating all of the binding sites on the target chromosome, the target chromosome would be twice as bright (contrast ratio of 2) as the other chromosomes since it would contain signal from the both the specific and the shared sequences in the stain, whereas the other chromosomes would only be stained by the shared sequences. Thus, only a modest decrease in hybridization of the shared sequences in the stain would substantially enhance the contrast. Thus, contaminating sequences which only hybridize to non-targeted sequences, for example, impurities in a library can be tolerated in the stain to the extent that the sequences do not reduce the staining contrast below useful levels.

### Example 6

### In Situ Hybridization

[0129] Generally, in situ hybridization comprises the following major steps: (1) fixation of tissue or biological structure to analyzed; (2) prehybridization treatment of the biological structure to increase accessibility of target DNA, and to reduce nonspecific binding; (3) hybridization of the mixture of nucleic acids to the nucleic acid in the biological structure or tissue; (4) posthybridization washes to remove nucleic acid fragments not bound in the hybridization and (5) detection of the hybridized nucleic acid fragments. The reagents used in each of these steps and their conditions for use vary depending on the particular application.

[0130] In some applications it is necessary to block the hybridization capacity of repetitive sequences. In this case, human genomic DNA is used as an agent to block such hybridization. The preferred size range is from about 200 bp to about 1000 bases, more preferably between about 400 to about 800 bp for double stranded, nick translated nucleic acids.

[0131] Hybridization protocols for the particular applications disclosed here are described in Pinkel et al. Proc. Natl. Acad. Sci. USA, 85: 9138-9142 (1988) and in EPO Pub. No. 430,402. Suitable hybridization protocols can also be found in Methods in Molecular Biology Vol. 33, In Situ Hybridization Protocols, K. H. A. Choo, ed., Humana Press, Totowa, N.J., (1994). +In a particularly preferred embodiment, the hybridization protocol of Kallioniemi et al., ERBB2 amplification in breast cancer analyzed by fluorescence in situ hybridization. Proc Natl Acad Sci USA, 89: 5321-5325 (1992) is used.

[0132] Typically, it is desirable to use dual color FISH, in which two probes are utilized, each labeled by a different fluorescent dye. A test probe that hybridizes to the region of interest is labeled with one dye, and a control probe that hybridizes to a different region is labeled with a second dye. A nucleic acid that hybridizes to a stable portion of the chromosome of interest, such as the centromere region, is often most useful as the control probe. In this way, differences between efficiency of hybridization from sample to sample can be accounted for.

[0133] The FISH methods for detecting chromosomal abnormalities can be performed on nanogram quantities of the subject nucleic acids. Paraffin embedded tumor sections can be used, as can fresh or frozen material. Because FISH can be applied to the limited material, touch preparations prepared from uncultured primary tumors can also be used (see, e.g., Kallioniemi, A. et al., Cytogenet. Cell Genet. 60: 190-193 (1992)). For instance, small biopsy tissue samples from tumors can be used for touch preparations (see, e.g., Kallioniemi, A. et al., Cytogenet. Cell Genet. 60: 190-193 (1992)). Small numbers of cells obtained from aspiration biopsy or cells in bodily fluids (e.g., blood, urine, sputum and the like) can also be analyzed. For prenatal diagnosis, appropriate samples will include amniotic fluid and the like.

### Example 7

### Quantitative PCR

[0134] Elevated gene expression is detected using quantitative PCR. Primers can be created to detect sequence amplification by signal amplification in gel electrophoresis. As is known in the art, primers or oligonucleotides are generally 15-40 bp in length, and usually flank unique sequence that can be amplified by methods such as polymerase chain reaction (PCR) or reverse transcriptase PCR (RT-PCR, also known as real-time PCR). Methods for RT-PCR and its optimization are known in the art. An example is the PROMEGA PCR Protocols and Guides, found at URL:<http://www.promega.com/guides/pcr guide/default.htm>, and hereby incorporated by reference. Currently at least four different chemistries, TaqMan® (Applied Biosystems, Foster City, Calif., USA), Molecular Beacons, Scorpions® and SYBR® Green (Molecular Probes), are available for real-time PCR. All of these chemistries allow detection of PCR products via the generation of a fluorescent signal. TaqMan probes, Molecular Beacons and Scorpions depend on Förster Resonance Energy Transfer (FRET) to generate the fluorescence signal via the coupling of a fluorogenic dye molecule and a quencher moiety to the same or different oligonucleotide substrates. SYBR Green is a fluorogenic dye that exhibits little fluorescence when in solution, but emits a strong fluorescent signal upon binding to double-stranded DNA.

[0135] Two strategies are commonly employed to quantify the results obtained by real-time RT-PCR; the standard curve method and the comparative threshold method. In this method, a standard curve is first constructed from an RNA of known concentration. This curve is then used as a reference standard for extrapolating quantitative information for mRNA targets of unknown concentrations. Another quantitation approach is termed the comparative Cₜ method. This involves comparing the Cₜ values of the samples of interest with a control or calibrator such as a non-treated sample or RNA from normal tissue. The Cₜ values of both the calibrator and the samples of interest are normalized to an appropriate endogenous housekeeping gene.

### Example 8

### High Throughput Screening

[0136] High throughput screening (HTS) methods are used to identify compounds that inhibit candidate genes which are related to drug resistance and reduced survival rate. HTS methods involve providing a combinatorial chemical or peptide library containing a large number of potential therapeutic compounds. Such “libraries” are then screened in one or more assays, as described herein, to identify those library members (particular peptides, chemical species or subclasses) that display the desired characteristic activity. The compounds thus identified can serve as conventional “lead compounds” or can themselves be used as potential or actual therapeutics.

[0137] A combinatorial chemical library is a collection of diverse chemical compounds generated by either chemical synthesis or biological synthesis, by combining a number of chemical “building blocks” such as reagents. For example, a linear combinatorial chemical library such as a polypeptide library is formed by combining a set of chemical building blocks (amino acids) in every possible way for a given compound length (i.e., the number of amino acids in a polypeptide compound). Millions of chemical compounds can be synthesized through such combinatorial mixing of chemical building blocks.

[0138] Preparation and screening of combinatorial chemical libraries is well known to those of skill in the art. Such combinatorial chemical libraries include, but are not limited to, peptide libraries (see, e.g., U.S. Pat. No. 5,010,175, Furka, Int. J. Pept. Prot. Res. 37:487-493 (1991) and Houghton et al., Nature 354:84-88 (1991)). Other chemistries for generating chemical diversity libraries can also be used. Such chemistries include, but are not limited to: peptoids (e.g., PCT Publication No. WO 91/19735), encoded peptides (e.g., PCT Publication WO 93/20242), random bio-oligomers (e.g., PCT Publication No. WO 92/00091), benzodiazepines (e.g., U.S. Pat. No. 5,288,514), diversomers such as hydantoins, benzodiazepines and dipeptides (Hobbs et al., Proc. Nat. Acad. Sci. USA 90:6909-6913 (1993)), vinylogous polypeptides (Hagihara et al., J. Amer. Chem. Soc. 114:6568 (1992)), nonpeptidal peptidomimetics with glucose scaffolding (Hirschmann et al., J. Amer. Chem. Soc. 114:9217-9218 (1992)), analogous organic syntheses of small compound libraries (Chen et al., J. Amer. Chem. Soc. 116:2661 (1994)), oligocarbamates (Cho et al., Science 261:1303 (1993)), and/or peptidyl phosphonates (Campbell et al., J. Org. Chem. 59:658 (1994)), nucleic acid libraries (see Ausubel, Berger and Sambrook, all supra), peptide nucleic acid libraries (see, e.g., U.S. Pat. No. 5,539,083), antibody libraries (see, e.g., Vaughn et al, Nature Biotechnology, 14(3):309-314 (1996) and PCT/US96/10287), carbohydrate libraries (see, e.g., Liang et al., Science, 274:1520-1522 (1996) and U.S. Pat. No. 5,593,853), small organic molecule libraries (see, e.g., benzodiazepines, Baum C&EN, January 18, page 33 (1993); isoprenoids, U.S. Pat. No. 5,569,588; thiazolidinones and metathiazanones, U.S. Pat. No. 5,549,974; pyrrolidines, U.S. Pat. Nos. 5,525,735 and 5,519,134; morpholino compounds, U.S. Pat. Nos. 5,506,337; benzodiazepines, 5,288,514, and the like).

[0139] Devices for the preparation of combinatorial libraries are commercially available (see, e.g., ECIS™, Applied BioPhysics Inc., Troy, N.Y., MPS, 390 MPS, Advanced Chem Tech, Louisville Ky., Symphony, Rainin, Woburn, Mass., 433A Applied Biosystems, Foster City, Calif., 9050 Plus, Millipore, Bedford, Mass.). In addition, numerous combinatorial libraries are themselves commercially available (see, e.g., ComGenex, Princeton, N.J., Tripos, Inc., St. Louis, Mo., 3D Pharmaceuticals, Exton, Pa., Martek Biosciences, Columbia, Md., etc.).

### Example 9

### Inhibitor Oligonucleotide and RNA Interference (RNAi) Sequence Design

[0140] Known methods are used to identify sequences that inhibit candidate genes which are related to drug resistance and reduced survival rate. Such inhibitors may include but are not limited to, siRNA oligonucleotides, antisense oligonucleotides, peptide inhibitors and aptamer sequences that bind and act to inhibit PVT1 expression and/or function.

[0141] RNA interference is used to generate small double-stranded RNA (small interference RNA or siRNA) inhibitors to affect the expression of a candidate gene generally through cleaving and destroying its cognate RNA. Small interference RNA (siRNA) is typically 19-22 nt double-stranded RNA. siRNA can be obtained by chemical synthesis or by DNA-vector based RNAi technology. Using DNA vector based siRNA technology, a small DNA insert (about 70 bp) encoding a short hairpin RNA targeting the gene of interest is cloned into a commercially available vector. The insert-containing vector can be transfected into the cell, and expressing the short hairpin RNA. The hairpin RNA is rapidly processed by the cellular machinery into 19-22 nt double stranded RNA (siRNA). In a preferred embodiment, the siRNA is inserted into a suitable RNAi vector because siRNA made synthetically tends to be less stable and not as effective in transfection.

[0142] siRNA can be made using methods and algorithms such as those described by Wang L, Mu FY. (2004) A Web-based Design Center for Vector-based siRNA and siRNA cassette. Bioinformatics. (In press); Khvorova A, Reynolds A, Jayasena S D. (2003) Functional siRNAs and miRNAs exhibit strand bias. Cell. 115(2):209-16; Harborth J, Elbashir S M, Vandenburgh K, Manning a H, Scaringe S A, Weber K, Tuschl T. (2003) Sequence, chemical, and structural variation of small interfering RNAs and short hairpin RNAs and the effect on mammalian gene silencing. Antisense Nucleic Acid Drug Dev. 13(2):83-105; Reynolds A, Leake D, Boese Q, Scaringe S, Marshall WS, Khvorova A. (2004) Rational siRNA design for RNA interference. Nat Biotechnol. 22(3):326-30 and Ui-Tei K, Naito Y, Takahashi F, Haraguchi T, Ohki-Hamazaki H, Juni A, Ueda R, Saigo K. (2004) Guidelines for the selection of highly effective siRNA sequences for mammalian and chick RNA interference. Nucleic Acids Res. 32(3):936-48, which are hereby incorporated by reference.

[0143] Other tools for constructing siRNA sequences are web tools such as the siRNA Target Finder and Construct Builder available from GenScript (http://www.genscript.com), Oligo Design and Analysis Tools from Integrated DNA Technologies (URL:<http://www.idtdna.com/SciTools/SciTools.aspx>), or siDESIGN™ Center from Dharmacon, Inc. (URL:<http://design.dharmacon.com/default.aspx?source=0>). siRNA are suggested to built using the ORF (open reading frame) as the target selecting region, preferably 50-100 nt downstream of the start codon. Because siRNAs function at the mRNA level, not at the protein level, to design an siRNA, the precise target mRNA nucleotide sequence may be required. Due to the degenerate nature of the genetic code and codon bias, it is difficult to accurately predict the correct nucleotide sequence from the peptide sequence. Additionally, since the function of siRNAs is to cleave mRNA sequences, it is important to use the mRNA nucleotide sequence and not the genomic sequence for siRNA design, although as noted in the Examples, the genomic sequence can be successfully used for siRNA design. However, designs using genomic information might inadvertently target introns and as a result the siRNA would not be functional for silencing the corresponding mRNA.

[0144] Rational siRNA design should also minimize off-target effects which often arise from partial complementarity of the sense or antisense strands to an unintended target. These effects are known to have a concentration dependence and one way to minimize off-target effects is often by reducing siRNA concentrations. Another way to minimize such off-target effects is to screen the siRNA for target specificity.

[0145] The siRNA can be modified on the 5′-end of the sense strand to present compounds such as fluorescent dyes, chemical groups, or polar groups. Modification at the 5′-end of the antisense strand has been shown to interfere with siRNA silencing activity and therefore this position is not recommended for modification. Modifications at the other three termini have been shown to have minimal to no effect on silencing activity.

[0146] It is recommended that primers be designed to bracket one of the siRNA cleavage sites as this will help eliminate possible bias in the data (i.e., one of the primers should be upstream of the cleavage site, the other should be downstream of the cleavage site). Bias may be introduced into the experiment if the PCR amplifies either 5′ or 3′ of a cleavage site, in part because it is difficult to anticipate how long the cleaved mRNA product may persist prior to being degraded. If the amplified region contains the cleavage site, then no amplification can occur if the siRNA has performed its function.

[0147] Antisense oligonucleotides (“oligos”) can be designed to inhibit candidate gene function. Antisense oligonucleotides are short single-stranded nucleic acids, which function by selectively hybridizing to their target mRNA, thereby blocking translation. Translation is inhibited by either RNase H nuclease activity at the DNA:RNA duplex, or by inhibiting ribosome progression, thereby inhibiting protein synthesis. This results in discontinued synthesis and subsequent loss of function of the protein for which the target mRNA encodes.

[0148] In a preferred embodiment, antisense oligos are phosphorothioated upon synthesis and purification, and are usually 18-22 bases in length. It is contemplated that the candidate gene antisense oligos may have other modifications such as 2′-O-Methyl RNA, methylphosphonates, chimeric oligos, modified bases and many others modifications, including fluorescent oligos.

[0149] In a preferred embodiment, active antisense oligos should be compared against control oligos that have the same general chemistry, base composition, and length as the antisense oligo. These can include inverse sequences, scrambled sequences, and sense sequences. The inverse and scrambled are recommended because they have the same base composition, thus same molecular weight and Tm as the active antisense oligonucleotides. Rational antisense oligo design should consider, for example, that the antisense oligos do not anneal to an unintended mRNA or do not contain motifs known to invoke immunostimulatory responses such as four contiguous G residues, palindromes of 6 or more bases and CG motifs.

[0150] Antisense oligonucleotides can be used in vitro in most cell types with good results. However, some cell types require the use of transfection reagents to effect efficient transport into cellular interiors. It is recommended that optimization experiments be performed by using differing final oligonucleotide concentrations in the 1-5 μm range with in most cases the addition of transfection reagents. The window of opportunity, i.e., that concentration where you will obtain a reproducible antisense effect, may be quite narrow, where above that range you may experience confusing non-specific, non-antisense effects, and below that range you may not see any results at all. In a preferred embodiment, down regulation of the targeted mRNA will be demonstrated by use of techniques such as northern blot, real-time PCR, cDNA/oligo array or western blot. The same endpoints can be made for in vivo experiments, while also assessing behavioral endpoints.

[0151] For cell culture, antisense oligonucleotides should be re-suspended in sterile nuclease-free water (the use of DEPC-treated water is not recommended). Antisense oligonucleotides can be purified, lyophilized, and ready for use upon re-suspension. Upon suspension, antisense oligonucleotide stock solutions may be frozen at −20° C. and stable for several weeks.

[0152] Aptamer sequences which bind to specific RNA or DNA sequences can be made. Aptamer sequences can be isolated through methods such as those disclosed in co-pending U.S. patent application Ser. No. 10/934,856, entitled, “Aptamers and Methods for their Invitro Selection and Uses Thereof,” which is hereby incorporated by reference.

[0153] It is contemplated that the sequences described herein may be varied to result in substantially homologous sequences which retain the same function as the original. As used herein, a polynucleotide or fragment thereof is “substantially homologous” (or “substantially similar”) to another if, when optimally aligned (with appropriate nucleotide insertions or deletions) with the other polynucleotide (or its complementary strand), using an alignment program such as BLASTN (Altschul, S. F., Gish, W., Miller, W., Myers, E.W. & Lipman, D. J. (1990) “Basic local alignment search tool.” J. Mol. Biol. 215:403-410), and there is nucleotide sequence identity in at least about 80%, preferably at least about 90%, and more preferably at least about 95-98% of the nucleotide bases.

### Example 10

### Inhibition of ADAM9 Induces Cell Apoptosis

[0154] It was found that silencing of ADAM9 inhibits breast cancer cell growth and cell proliferation and inhibition of ADAM9 expression in breast cancer cells induces cell apoptosis. Thus, ADAM9 is implicated in proliferative aspects of breast cancer pathophysiology and serves as a possible therapeutic target in breast cancer.

[0155] A comprehensive study of gene expression and copy number in primary breast cancers and breast cancer cell lines was carried out, whereby we identified a region of high level amplification on chromosome 8p11 that is associated with reduced survival duration. The metalloproteinase-like, disintegrin-link and cysteine-rich protein, ADAM9, identified herein, maps to the region of amplification at 8p11. siRNA knockdown was applied to explore how amplification and over-expression of this particular gene play a role in breast cancer pathophysiology and to determine if this gene may be a valuable therapeutic target.

[0156] We transiently transfected 83 nM of siRNA for ADAM9 into T47D, BT549, SUM52PE, 600 MPE and MCF10A breast cancer cell lines. Non-specific siRNA served as a negative control. Cell viability/proliferation was evaluated by CellTiter-Glo® luminescent cell viability assay (CTG, Promega), cell apoptosis was assayed using YoPro-1 and Hoechst staining and cell cycle inhibition was assessed by measuring BrdU incorporation. All cellular measurements were made in adhered cells using the Cellomics high content scanning instrument. All assays were run at 3, 4, 5 and 6 days post transfection.

[0157] Briefly, the siRNA transfection protocol was as follows. Cells are plated and grown to 50-70% confluency and transfected using DharmaFECT1. In tubes, mix: Tube A: total volume 10 ul 9.5 uL SFM media+0.5siRNA (varied according to the experiment design); Tube B: total volume 10 ul 9.8 uL SFM media+0.2 DharmaFECT1. Incubate tubes for 5 min. During this incubation, remove media from target cells and replace with SFM in each well. Add contents of Tube B to Tube A and mix gently. Incubate for 20 min at room temperature. Add 20 uL mixture solution dropwise to each well (final volume=100 uL). Leave for 4 h, aspirate off media and replace with full growth media and allow cells to grow for several days.

[0158] Cell growth analysis was carried out using the CellTitter-Glo® Luminescent Cell Ciability Assay (Promega Cat#G7571/2/3). The luminescence signal of viable cells as measured the amount of ATP detected in the plates were read using a custom plate reader and program.

[0159] BrdU Staining and Fixation for Cellomics were used to measure cell proliferation and cell cycle analysis. To incorporate BrdU and fix the cells 10 uM final concentration of BrdU (Sigma #B5002) was added directly to cell media and pulsed for 30 minutes in tissue culture incubator. The media was removed and the cells washed 2× with 1×PBS and then 70% EtOH added to cover cells and fix for overnight at 4° C. Next day the 70% EtOH was removed and cells allowed to dry. Then 2N HCl was added and cells incubated at room temperature for 5-10 minutes, then removed and 1×PBS added to neutralize. Diluted anti-BrdU antibody (Mouse anti-BrdU Clone 3D4 (BD Pharmingen #555627)) 1:100 in 1×PBS/0.5% Tween-20. Anti-BrdU was added to cells (50 ul-96 well plate; 200 ul-24 well plate) and incubated for 45-60 minutes at room temperature on a rocker. Antibody was aspirated and cells washed 2× with 1×PBS/0.5% Tween-20. Rabbit Anti-mouse Alexa Fluor 488 (Invitrogen #A-11059) was diluted 1:250 in 1×PBS/0.5% Tween-20. Secondary antibody was added to cells and incubated 30-60 minutes at room temperature on a rocker then washed 3× with 1×PBS/0.5% Tween-20. After the last wash was removed and cells were incubated with 1 ug/ml Hoechst 33342 (Sigma #B2261) diluted in 1×PBS for 45 minutes at room temperature on a rocker. Cells were washed and covered with 1×PBS. Plates were scanned or stored at 4° C. for later scanning on Cellomics.

[0160] YoPro-1 Staining for Cellomics was used for cell apoptosis analysis. Add YoPro-1(Final use at 1 ug/ml) and Hoechst (Final use at 10 ug/ml) directly to cell media. Place in 37° C. incubator for 30 min. Then read directly on Cellomics Significant knockdown of ADAM9 was achieved in BT549 and T47D cells transfected with siRNA-ADAM9 for 48 hr, 72 hr and 96 hr. Silencing of ADAM9 significantly reduced the proliferation of breast cancer cells and inhibited the BrdU incorporation after treatment with siRNA compared to controls. Knockdown of ADAM9 in breast cancer cells also induced significant levels of apoptosis. Furthermore, we found that cells had very good response when the concentration of siRNA-ADAM9 were higher than 30 nM. The current results suggested that silencing expression of ADAM9 is a novel approach for inhibition of breast cancer cell growth. ADAM9 may serve as a new candidate therapeutic target for treatment of breast cancer with poor outcome.

### Example 11

### Inhibition of Genes Encoded by the 11q13 Amplicon

[0161] As described above, the 11q13 amplicon encodes ten genes or non-coding RNA transcripts that appear likely to contribute to the pathophysiology of breast cancer and that are potential therapeutic targets. None of these genes are considered druggable based on predicted protein folding characteristics. However, all are candidates for siRNA therapeutic attack. We applied an efficient siRNA transfection strategy as explained in Example 9 to assess the therapeutic potential of siRNAs against genes encoded in the region of recurrent amplification at 11q13.

[0162] We transiently transfect 50 nM of siRNAs targeting these genes (4 individual siRNAs per gene, Table 8) in cell lines amplified at 11q13 (HCC1954, ZR75B, MDAMB415 and CAMA1) and not amplified (BT474, HS578T and MCF10A). Non-specific siRNA served as a negative control Viable cell number and apoptosis index were measured for each siRNA. These analyses showed that silencing of CCND1, FGF3, PPFIA1, FOLR3, and NEU3 reduced the cell growth of 11q13-amplified breast cancer cells compared to unamplified controls (FIG. 11). Knockdown of FGF3, PPFIA1 and NEU3 also induced cell apoptosis in amplified cell lines (HCC1954 and ZR75B), but not in non-amplified lines MCF10A (FIG. 12).

[0163] To further validated the therapeutic potential of targeting FGF3, PPFIA1 and NEU3, we packaged shRNA lenti-virus (5 shRNAs for each gene, Open Biosystems Inc. Table 9 using the third generation lenti-virus packaging system and infected breast cells in which amplified/overexpressed FGF3, PPFIA1 and NEU3 are overexpressed with these lentiviral shRNAs. Knockdown efficiency was then measured by western blot. We identified successful clones marked with arrows (at least one clone for each gene) that can knock down more than 80% protein of the target genes (FIG. 13).

[0164] Knockdown of FGF3, PPFIA1, and NEU3 also induced cell apoptosis and inhibited cell growth in 3D culture. We measured cell apoptosis by caspase3 activity and/or YoPRO plus Hoechst staining after cells infected with shRNAs using methodology described in Example 9. We found that knockdown of FGF3, PPFIA1 and NEU3 by shRNA significantly increased cell apoptosis in breast cancer cells (FIG. 14). We also examined the effects in a 3D culture system, which can mimic in vivo environments. Our data showed that when each of these three genes was silenced in CAMA1 and HCC1954 cells, the colonies were much smaller in comparison to the shRNA control that was also cultured in the 3D culture system (FIG. 15).

[0165] Combinational knockdown of genes at 11q13 amplicon has the synergistic effect in breast cancer cells.

[0166] To evaluate the synergistic effect on knockdown of candidate therapeutic targets FGF3, PPFIA1, NEU3 and CCND1, we infected breast cancer cells with shRNAs lentivirus individually and/or combinationally. Our data showed that combinational knockdown of NEU3 and PPFIA1 significantly inhibited cell growth (FIG. 16A). Combinational knockdown of NEU3 and PPFIA1 also increased cell apoptosis dramatically (FIG. 16B), which is consistent with our cell growth data. Our findings indicated that knockdown of NEU3 and PPFIA1 at the same time has a singificant synergistic effect on cell growth inhibition and cell apoptosis. In summary, the data in these examples show that FGF3, PPFIA1, and NEU3 and the combination of NEU3 and PPFIA1, in particular, are potential therapeutic targets in breast cancer cells.

### Example 12

### Inhibition of Genes Encoded by the 20q13 Amplicon

[0167] As described above, the 20q13 amplicon encodes fourteen genes or non-coding RNA transcripts that appear likely to contribute to the pathophysiology of breast cancer and that are potential therapeutic targets. None of these genes are considered druggable based on predicted protein folding characteristics. However, all are candidates for siRNA therapeutic attack. We applied an efficient siRNA transfection strategy as explained in Example 9 to assess the therapeutic potential of siRNAs against genes encoded in the region of recurrent amplification at 20q13. We transiently transfected 50 nM of siRNAs (Table 10) targeting these genes (4 individual siRNAs per gene) in cell lines amplified at 20q13 (BT474, MCF7, MDAMB157 and SUM52PE) and not amplified (MCF10A and ZR75B). Non-specific siRNA served as a negative control. Viable cell number, proliferation and apoptosis index were measured for each siRNA using the assays described in Example 9. These analyses showed that silencing of CSTF1, PCK1, RAB22A, VAPB, GNAS, C20orf45, BCAS1, TMEPA1 and STX16 reduced the cell growth of 20q13-amplified breast cancer cells compared to unamplified controls (FIG. 17). Knockdown of VAPB, GNAS, TMEPAI and STX16 also inhibited cell proliferation (the percentage of S-phase cells) and induced cell apoptosis in amplified cell lines MCF7 and SUM52PE cells (FIGS. 18 and 19). Caspase 3 activity also increased in SUM52PE cells treated for 72 hours with VAPB, GNAS, TMEPAI and STX16 siRNAs (FIG. 20). siGNAS also knocked down Gs transcripts in the amplified cell lines (FIG. 21). These results indicate that therapeutic strategies, e.g., targeting CSTF1, PCK1, VAPB, GNAS, BCAS1, TMEPAI and STX16 genes, may be particularly effective in treating patients with 20q13 amplification.

### CITATIONS

[0168] Akagi, K., Suzuki, T., Stephens, R. M., Jenkins, N. A., and Copeland, N. G. (2004). RTCGD: retroviral tagged cancer gene database. Nucleic Acids Res 32, D523-527.
[0169] Al-Kuraya, K., Schraml, P., Torhorst, J., Tapia, C., Zaharieva, B., Novotny, H., Spichtin, H., Maurer, R., Mirlacher, M., Kochli, O., et al. (2004). Prognostic relevance of gene amplifications and coamplifications in breast cancer. Cancer Res 64, 8534-8540.
[0170] Albertson, D. G., Collins, C., McCormick, F., and Gray, J. W. (2003). Chromosome aberrations in solid tumors. Nat Genet 34, 369-376.
[0171] Babu, J. R., Jeganathan, K. B., Baker, D. J., Wu, X., Kang-Decker, N., and van Deursen, J. M. (2003). Rael is an essential mitotic checkpoint regulator that cooperates with Bub3 to prevent chromosome missegregation. J Cell Biol 160, 341-353.
[0172] Barlund, M., Monni, O., Kononen, J., Cornelison, R., Torhorst, J., Sauter, G., Kallioniemi, O.-P., and Kallioniemi, A. (2000). Multiple genes at 17q23 undergo amplification and overexpression in breast cancer. Cancer Res 60, 5340-5344.
[0173] Barlund, M., Tirkkonen, M., Forozan, F., Tanner, M. M., Kallioniemi, O., and Kallioniemi, A. (1997). Increased copy number at 17q22-q24 by CGH in breast cancer is due to high-level amplification of two separate regions. Genes Chromosomes Cancer 20, 372-376.
[0174] Baylin, S. B., and Herman, J. G. (2000). DNA hypermethylation in tumorigenesis: epigenetics joins genetics. Trends Genet 16, 168-174.
[0175] Beissbarth, T., and Speed, T. P. (2004). GOstat: find statistically overrepresented Gene Ontologies within a group of genes. Bioinformatics 20, 1464-5 (2004). Bioinformatics 20, 1464-1465.
[0176] Blegen, H., Will, J. S., Ghadimi, B. M., Nash, H. P., Zetterberg, A., Auer, G., and Ried, T. (2003). DNA amplifications and aneuploidy, high proliferative activity and impaired cell cycle control characterize breast carcinomas with poor prognosis. Anal Cell Pathol 25, 103-114.
[0177] Braun, B. S., and Shannon, K. (2004). The sum is greater than the FGFR1 partner. Cancer Cell 5, 203-204.
[0178] Callagy, G., Pharoah, P., Chin, S. F., Sangan, T., Daigo, Y., Jackson, L., and Caldas, C. (2005). Identification and validation of prognostic markers in breast cancer with the complementary use of array-CGH and tissue microarrays. J Pathol 205, 388-396.
[0179] Cheng, K. W., Lahad, J. P., Kuo, W. L., Lapuk, A., Yamada, K., Auersperg, N., Liu, J., Smith-McCune, K., Lu, K. H., Fishman, D., et al. (2004). The RAB25 small GTPase determines aggressiveness of ovarian and breast cancers. Nat Med 10, 1251-1256.
[0180] Chin, K., de Solorzano, C. O., Knowles, D., Jones, A., Chou, W., Rodriguez, E. G., Kuo, W. L., Ljung, B. M., Chew, K., Myambo, K., et al. (2004). In situ analyses of genome instability in breast cancer. Nat Genet 36, 984-988.
[0181] Clairmont, C. A., Narayanan, L., Sun, K. W., Glazer, P. M., and Sweasy, J. B. (1999). The Tyr-265-to-Cys mutator mutant of DNA polymerase beta induces a mutator phenotype in mouse LN12 cells. Proc Natl Acad Sci USA 96, 9580-9585.
[0182] Deutschbauer, A. M., Jaramillo, D. F., Proctor, M., Kumm, J., Hillenmeyer, M. E., Davis, R. W., Nislow, C., and Giaever, G. (2005). Mechanisms of haploinsufficiency revealed by genome-wide profiling in yeast. Genetics 169, 1915-1925.
[0183] Esteva, F. J., Sahin, A. A., Cristofanilli, M., Coombes, K., Lee, S. J., Baker, J., Cronin, M., Walker, M., Watson, D., Shak, S., and Hortobagyi, G. N. (2005). Prognostic role of a multigene reverse transcriptase-PCR assay in patients with node-negative breast cancer not receiving adjuvant systemic therapy. Clin Cancer Res 11, 3315-3319.
[0184] Fraser, M. M., Watson, P. M., Fraig, M. M., Kelley, J. R., Nelson, P. S., Boylan, A. M., Cole, D. J., and Watson, D. K. (2005). CaSm-mediated cellular transformation is associated with altered gene expression and messenger RNA stability. Cancer Res 65, 6228-6236.
[0185] Fridlyand, J., Snijders, A. M., Ylstra, B., Li, H., Olshen, A., Segraves, R., Dairkee, S., Tokuyasu, T., Ljung, B. M., Jain, A. N., et al. (2006). Breast tumor copy number aberration phenotypes and genomic instability. BMC Cancer 6, 96.
[0186] Gelsi-Boyer, V., Orsetti, B., Cervera, N., Finetti, P., Sircoulomb, F., Rouge, C., Lasorsa, L., Letessier, A., Ginestier, C., Monville, F., et al. (2005). Comprehensive profiling of 8p11-12 amplification in breast cancer. Mol Cancer Res 3, 655-667.
[0187] Gianni, L., Zambetti, M., Clark, K., Baker, J., Cronin, M., Wu, J., Mariani, G., Rodriguez, J., Carcangiu, M., Watson, D., et al. (2005). Gene Expression Profiles in Paraffin-Embedded Core Biopsy Tissue Predict Response to Chemotherapy in Women With Locally Advanced Breast Cancer. J Clin Oncol.
[0188] Greten, F. R., and Karin, M. (2004). The IKK/NF-kappaB activation pathway-a target for prevention and treatment of cancer. Cancer Lett 206, 193-199.
[0189] Hackett, C. S., Hodgson, J. G., Law, M. E., Fridlyand, J., Osoegawa, K., de Jong, P. J., Nowak, N.J., Pinkel, D., Albertson, D. G., Jain, A., et al. (2003). Genome-wide array CGH analysis of murine neuroblastoma reveals distinct genomic aberrations which parallel those in human tumors. Cancer Res 63, 5266-5273.
[0190] Hanahan, D., and Weinberg, R. A. (2000). The hallmarks of cancer. Cell 100, 57-70.
[0191] Hartigan, J. A. (1975). Clustering Algorithms (New York: Wiley).
[0192] Hinds, P. W., Dowdy, S. F., Eaton, E. N., Arnold, A., and Weinberg, R. A. (1994). Function of a human cyclin gene as an oncogene. Proc Natl Acad Sci USA 91, 709-713.
[0193] Hodgson, G., Hager, J. H., Vole, S., Hariono, S., Wernick, M., Moore, D., Nowak, N., Albertson, D. G., Pinkel, D., Collins, C., et al. (2001). Genome scanning with array CGH delineates regional alterations in mouse islet carcinomas. Nat Genet 29, 459-464.
[0194] Huang, G., Krig, S., Kowbel, D., Xu, H., Hyun, B., Volik, S., Feuerstein, B., Mills, G. B., Stokoe, D., Yaswen, P., and Collins, C. (2005). ZNF217 suppresses cell death associated with chemotherapy and telomere dysfunction. Hum Mol Genet 14, 3219-3225.
[0195] Hyman, E., Kauraniemi, P., Hautaniemi, S., Wolf, M., Mousses, S., Rozenblum, E., Ringner, M., Sauter, G., Monni, O., Elkahloun, A., et al. (2002). Impact of DNA amplification on gene expression patterns in breast cancer. Cancer Res 62, 6240-6245.
[0196] Irizarry, R., Bolstad, B., Collin, F., Cope, L., Hobbs, B., and Speed, T. (2003). Summaries of Affymetrix GeneChip probe level data. Nucleic Acids Research 31, el 5.
[0197] Isola, J., Chu, L., DeVries, S., Matsumura, K., Chew, K., Ljung, B. M., and Waldman, F. M. (1999). Genetic alterations in ERBB2-amplified breast carcinomas. Clin Cancer Res 5, 4140-4145.
[0198] Isola, J. J., Kallioniemi, O. P., Chu, L. W., Fuqua, S. A., Hilsenbeck, S. G., Osborne, C. K., and Waldman, F. M. (1995). Genetic aberrations detected by comparative genomic hybridization predict outcome in node-negative breast cancer. Am J Pathol 147, 905-911.
[0199] Jain, A. N., Chin, K., Borresen-Dale, A. L., Erikstein, B. K., Eynstein Lonning, P., Kaaresen, R., and Gray, J. W. (2001). Quantitative analysis of chromosomal CGH in human breast tumors associates copy number abnormalities with p53 status and patient survival. Proc Natl Acad Sci USA 98, 7952-7957.
[0200] Jain, A. N., Tokuyasu, T. A., Snijders, A. M., Segraves, R., Albertson, D. G., and Pinkel, D. (2002). Fully automatic quantification of microarray image data. Genome Res 12, 325-332.
[0201] Jones, P. A. (2005). Overview of cancer epigenetics. Semin Hematol 42, S3-8.
[0202] Kallioniemi, A., Kallioniemi, O. P., Piper, J., Tanner, M., Stokke, T., Chen, L., Smith, H. S., Pinkel, D., Gray, J. W., and Waldman, F. M. (1994). Detection and mapping of amplified DNA sequences in breast cancer by comparative genomic hybridization. Proc Natl Acad Sci USA 91, 2156-2160.
[0203] Kallioniemi, O. P., Kallioniemi, A., Kurisu, W., Thor, A., Chen, L. C., Smith, H. S., Waldman, F. M., Pinkel, D., and Gray, J. W. (1992). ERBB2 amplification in breast cancer analyzed by fluorescence in situ hybridization. Proc Natl Acad Sci USA 89, 5321-5325.
[0204] Kauraniemi, P., Barlund, M., Monni, O., and Kallioniemi, A. (2001). New amplified and highly expressed genes discovered in the ERBB2 amplicon in breast cancer by cDNA microarrays. Cancer Res 61, 8235-8240.
[0205] Kauraniemi, P., Kuukasjarvi, T., Sauter, G., and Kallioniemi, A. (2003). Amplification of a 280-kilobase core region at the ERBB2 locus leads to activation of two hypothetical proteins in breast cancer. Am J Pathol 163, 1979-1984.
[0206] Knuutila, S., Autio, K., and Aalto, Y. (2000). Online access to CGH data of DNA sequence copy number changes. Am J Pathol 157, 689.
[0207] Lam, L. T., Davis, R. E., Pierce, J., Hepperle, M., Xu, Y., Hottelet, M., Nong, Y., Wen, D., Adams, J., Dang, L., and Staudt, L. M. (2005). Small molecule inhibitors of IkappaB kinase are selectively toxic for subgroups of diffuse large B-cell lymphoma defined by gene expression profiling. Clin Cancer Res 11, 28-40.
[0208] Loo, L. W., Grove, D. I., Williams, E. M., Neal, C. L., Cousens, L. A., Schubert, E. L., Holcomb, I. N., Massa, H. F., Glogovac, J., Li, C. I., et al. (2004). Array comparative genomic hybridization analysis of genomic alterations in breast cancer subtypes. Cancer Res 64, 8541-8549.
[0209] Mazzocca, A., Coppari, R., De Franco, R., Cho, J. Y., Libermann, T. A., Pinzani, M., and Toker, A. (2005). A secreted form of ADAM9 promotes carcinoma invasion through tumor-stromal interactions. Cancer Res 65, 4728-4738.
[0210] Naylor, T. L., Greshock, J., Wang, Y., Colligon, T., Yu, Q. C., Clemmer, V., Zaks, T. Z., and Weber, B. L. (2005). High resolution genomic analysis of sporadic breast cancer using array-based comparative genomic hybridization. Breast Cancer Res 7, R1186-1198.
[0211] Nonet, G., Stampfer, M., Chin, K., Gray, J. W., Collins, C., and Yaswen, P. (2001). The ZNF217 gene amplified in breast cancers promotes immortalization of human mammary epithelial cells. Cancer Research 61, 1250-1254.
[0212] Okunieff, P., Fenton, B. M., Zhang, L., Kern, F. G., Wu, T., Greg, J. R., and Ding, I. (2003). Fibroblast growth factors (FGFS) increase breast tumor growth rate, metastases, blood flow, and oxygenation without significant change in vascular density. Adv Exp Med Biol 530, 593-601.
[0213] Olshen, A. B., Venkatraman, E. S., Lucito, R., and Wigler, M. (2004). Circular binary segmentation for the analysis of array-based DNA copy number data. Biostatistics 5, 557-572.
[0214] Ouspenski, II, Elledge, S. J., and Brinkley, B. R. (1999). New yeast genes important for chromosome integrity and segregation identified by dosage effects on genome stability. Nucleic Acids Res 27, 3001-3008.
[0215] Perou, C. M., Jeffrey, S. S., van de Rijn, M., Rees, C. A., Eisen, M. B., Ross, D. T., Pergamenschikov, A., Williams, C. F., Zhu, S. X., Lee, J. C., et al. (1999). Distinctive gene expression patterns in human mammary epithelial cells and breast cancers. Proc Natl Acad Sci USA 96, 9212-9217.
[0216] Perou, C. M., Sorlie, T., Eisen, M. B., van de Rijn, M., Jeffrey, S. S., Rees, C. A., Pollack, J. R., Ross, D. T., Johnsen, H., Akslen, L. A., et al. (2000). Molecular portraits of human breast tumours. Nature 406, 747-752.
[0217] Pinkel, D., Segraves, R., Sudar, D., Clark, S., Poole, I., Kowbel, D., Collins, C., Kuo, W. L., Chen, C., Zhai, Y., et al. (1998). High resolution analysis of DNA copy number variation using comparative genomic hybridization to microarrays. Nat Genet 20, 207-211.
[0218] Pollack, J. R., Perou, C. M., Alizadeh, A. A., Eisen, M. B., Pergamenschikov, A., Williams, C. F., Jeffrey, S. S., Botstein, D., and Brown, P. O. (1999). Genome-wide analysis of DNA copy-number changes using cDNA microarrays. Nat Genet 23, 41-46.
[0219] Pollack, J. R., Sorlie, T., Perou, C. M., Rees, C. A., Jeffrey, S. S., Lonning, P. E., Tibshirani, R., Botstein, D., Borresen-Dale, A. L., and Brown, P. O. (2002). Microarray analysis reveals a major direct role of DNA copy number alteration in the transcriptional program of human breast tumors. Proc Natl Acad Sci USA 99, 12963-12968.
[0220] Press, M. F., Sauter, G., Bernstein, L., Villalobos, I. E., Mirlacher, M., Zhou, J. Y., Wardeh, R., Li, Y. T., Guzman, R., Ma, Y., et al. (2005). Diagnostic evaluation of HER-2 as a molecular target: an assessment of accuracy and reproducibility of laboratory testing in large, prospective, randomized clinical trials. Clin Cancer Res 11, 6598-6607.
[0221] Ramaswamy, S., Ross, K. N., Lander, E. S., and Golub, T. R. (2003). A molecular signature of metastasis in primary solid tumors. Nat Genet 33, 49-54.
[0222] Ray, M. E., Yang, Z. Q., Albertson, D., Kleer, C. G., Washburn, J. G., Macoska, J. A., and Ethier, S. P. (2004). Genomic and expression analysis of the 8p11-12 amplicon in human breast cancer cell lines. Cancer Res 64, 40-47.
[0223] Reyal, F., Stransky, N., Bernard-Pierrot, I., Vincent-Salomon, A., de Rycke, Y., Elvin, P., Cassidy, A., Graham, A., Spraggon, C., Desille, Y., et al. (2005). Visualizing chromosomes as transcriptome correlation maps: evidence of chromosomal domains containing co-expressed genes—a study of 130 invasive ductal breast carcinomas. Cancer Res 65, 1376-1383.
[0224] Russ, A. P., and Lampel, S. (2005). The druggable genome: an update. Drug Discov Today 10, 1607-1610.
[0225] Slamon, D. J., Godolphin, W., Jones, L. A., Holt, J. A., Wong, S. G., Keith, D. E., Levin, W. J., Stuart, S. G., Udove, J., Ullrich, A., and et al. (1989). Studies of the HER-2/neu proto-oncogene in human breast and ovarian cancer. Science 244, 707-712.
[0226] Snijders, A. M., Fridlyand, J., Mans, D. A., Segraves, R., Jain, A. N., Pinkel, D., and Albertson, D. G. (2003). Shaping of tumor and drug-resistant genomes by instability and selection. Oncogene 22, 4370-4379.
[0227] Snijders, A. M., Nowak, N., Segraves, R., Blackwood, S., Brown, N., Conroy, J., Hamilton, G., Hindle, A. K., Huey, B., Kimura, K., et al. (2001). Assembly of microarrays for genome-wide measurement of DNA copy number. Nat Genet 29, 263-264.
[0228] Solinas-Toldo, S., Lampel, S., Stilgenbauer, S., Nickolenko, J., Benner, A., Dohner, H., Cremer, T., and Lichter, P. (1997). Matrix-based comparative genomic hybridization: biochips to screen for genomic imbalances. Genes Chromosomes Cancer 20, 399-407.
[0229] Sorlie, T., Perou, C. M., Tibshirani, R., Aas, T., Geisler, S., Johnsen, H., Hastie, T., Eisen, M. B., van de Rijn, M., Jeffrey, S. S., et al. (2001). Gene expression patterns of breast carcinomas distinguish tumor subclasses with clinical implications. Proc Natl Acad Sci USA 98, 10869-10874.
[0230] Sorlie, T., Tibshirani, R., Parker, J., Hastie, T., Marron, J. S., Nobel, A., Deng, S., Johnsen, H., Pesich, R., Geisler, S., et al. (2003). Repeated observation of breast tumor subtypes in independent gene expression data sets. Proc Natl Acad Sci USA 100, 8418-8423.
[0231] Still, I. H., Hamilton, M., Vince, P., Wolfman, A., and Cowell, J. K. (1999). Cloning of TACC1, an embryonically expressed, potentially transforming coiled coil containing gene, from the 8p11 breast cancer amplicon. Oncogene 18, 4032-4038.
[0232] Tanaka, S., Sugimachi, K., Kawaguchi, H., Saeki, H., Ohno, S., and Wands, J. R. (2000). Grb7 signal transduction protein mediates metastatic progression of esophageal carcinoma. J Cell Physiol 183, 411-415.
[0233] Tanner, M. M., Tirkkonen, M., Kallioniemi, A., Collins, C., Stokke, T., Karhu, R., Kowbel, D., Shadravan, F., Hintz, M., Kuo, W. L., and et al. (1994). Increased copy number at 20q13 in breast cancer: defining the critical region and exclusion of candidate genes. Cancer Res 54, 4257-4260.
[0234] van 't Veer, L. J., Dai, H., van de Vijver, M. J., He, Y. D., Hart, A. A., Mao, M., Peterse, H. L., van der Kooy, K., Marton, M. J., Witteveen, A. T., et al. (2002). Gene expression profiling predicts clinical outcome of breast cancer. Nature 415, 530-536.
[0235] van de Vijver, M. J., He, Y. D., van't Veer, L. J., Dai, H., Hart, A. A., Voskuil, D. W., Schreiber, G. J., Peterse, J. L., Roberts, C., Marton, M. J., et al. (2002). A gene-expression signature as a predictor of survival in breast cancer. N Engl J Med 347, 1999-2009.
[0236] Vogel, C. L., Cobleigh, M. A., Tripathy, D., Gutheil, J. C., Harris, L. N., Fehrenbacher, L., Slamon, D. J., Murphy, M., Novotny, W. F., Burchmore, M., et al. (2002). Efficacy and safety of trastuzumab as a single agent in first-line treatment of HER2-overexpressing metastatic breast cancer. J Clin Oncol 20, 719-726.
[0237] Weber-Mangal, S., Sinn, H. P., Popp, S., Klaes, R., Emig, R., Bentz, M., Mansmann, U., Bastert, G., Bartram, C. R., and Jauch, A. (2003). Breast cancer in young women (<or =35 years): Genomic aberrations detected by comparative genomic hybridization. Int J Cancer 107, 583-592.
[0238] Willenbrock, H., and Fridlyand, J. (2005). A comparison study: applying segmentation to array CGH data for downstream analyses. Bioinformatics.
[0239] Yeung, K. Y., Fraley, C., Murua, A., Raftery, A. E., and Ruzzo, W. L. (2001). Model-based clustering and data transformations for gene expression data. Bioinformatics 17, 977-987.
[0240] Yeung, K. Y., Medvedovic, M., and Bumgamer, R. E. (2004). From co-expression to co-regulation: how many microarray experiments do we need? Genome Biol 5, R48.
[0241] Yi, Y., Mirosevich, J., Shyr, Y., Matusik, R., and George, A. L., Jr. (2005). Coupled analysis of gene expression and chromosomal location. Genomics 85, 401-412.
[0242] Zhu, Y., Kan, L., Qi, C., Kanwar, Y. S., Yeldandi, A. V., Rao, M. S., and Reddy, J. K. (2000). Isolation and characterization of peroxisome proliferator-activated receptor (PPAR) interacting protein (PRIP) as a coactivator for PPAR. J Biol Chem 275, 13510-13516.

[0243] While the present sequences, compositions and processes have been described with reference to specific details of certain exemplary embodiments thereof, it is not intended that such details be regarded as limitations upon the scope of the invention. The present examples, methods, procedures, specific compounds and molecules are meant to exemplify and illustrate the invention and should in no way be seen as limiting the scope of the invention. Any patents, publications, publicly available sequences mentioned in this specification and listed above are indicative of levels of those skilled in the art to which the invention pertains and are hereby incorporated by reference to the same extent as if each were specifically and individually incorporated by reference.

TABLE 1
Univariate and multivariate associations for individual amplicons and/or disease specific survival and distant
recurrence. Also shown are the chromosomal positions of the beginning and ends of the amplicons and the flanking clones.
Associations are shown for the entire sample set and for luminal A tumors (univariate associations only).

| | | | | | | | p-value | | | |
|---|---|---|---|---|---|---|---|---|---|---|
| | | Flanking | | | p-value | | luminal A, | | p-value | |
| | Flanking | clone | | | univariate | | univariate | | multivariate | |
| Amplicon | clone (left) | (right) | kbStart | kbEnd | survival | recurrence | survival | recurrence | survival | recurrence |
| 8p11-12 | RP11- | RP11- | 33579 | 43001 | 0.011 | 0.004 | 0.022 | 0.004 | 0.037 | 0.006 |
| | 258M15 | 73M19 | | | | | | | | |
| 8q24 | RP11-65D17 | RP11- | 127186 | 132829 | 0.830 | 0.880 | 0.140 | 1.0 | 0.870 | 0.720 |
| | | 94M13 | | | | | | | | |
| 11q13-14 | CTD-2080I19 | RP11- | 68482 | 71659 | 0.540 | 0.410 | 0.016 | 0.240 | 0.660 | 0.440 |
| | | 256P19 | | | | | | | | |
| 11q13-14 | RP11- | RP11- | 73337 | 78686 | 0.230 | 0.150 | 0.016 | 0.240 | 0.360 | 0.190 |
| | 102M18 | 215H8 | | | | | | | | |
| 12q13-14 | BAL12B2624 | RP11- | 67191 | 74053 | 0.250 | 0.260 | 0.230 | 0.098 | 0.920 | 0.960 |
| | | 92P22 | | | | | | | | |
| 17q11-12 | RP11-58O8 | RP11- | 34027 | 38681 | 0.004 | 0.004 | 1.0 | 1.0 | 0.022/ 0.008 | |
| | | 87N6 | | | | | | | | |
| 17q21-24 | RP11-234J24 | RP11- | 45775 | 70598 | 0.960 | 0.920 | 0.610 | 0.290 | 0.530 | 0.630 |
| | | 84E24 | | | | | | | | |
| 20q13 | RMC20B4135 | RP11- | 51669 | 53455 | 0.340 | 0.800 | 0.048 | 0.140 | 0.590 | 0.970 |
| | | 278I13 | | | | | | | | |
| 20q13 | GS-32I19 | RP11- | 55630 | 59444 | 0.087 | 0.230 | 0.048 | 0.140 | 0.060 | 0.220 |
| | | 94A18 | | | | | | | | |
| Any | | | | | 0.005 | 0.003 | 0.024 | 0.120 | 0.034 | 0.009 |
| ammplicon | | | | | | | | | | |

TABLE 2
Associations of genomic variables with clinical features.

| | | | | Number of | Presence of |
|---|---|---|---|---|---|
| | Fraction of | Total number of | Number of | recurrent | recurrent |
| | genome altered¹ | transitions² | amplified arms³ | amplicons⁴ | amplicons⁵ |
| 1. ER (neg vs. pos) | <0.001 | <0.001 | 0.376 | 0.147 | 0.482 |
| 2. PR (neg vs. pos) | 0.005 | <0.001 | <0.050 | 0.319 | 0.390 |
| 3. Nodes (pos vs. neg) | 0.053 | 0.106 | 0.012 | 0.012 | 0.008 |
| 4. Stage (>1 vs. 1) | 0.013 | 0.052 | 0.045 | 0.312 | 0.368 |
| 5. ERBB2 (pos vs. neg) | 0.650 | 0.830 | 0.015 | <.001 | <0.001 |
| 6. Ki67 (>0.1 vs. <0.1) | 0.013 | 0.031 | 0.024 | 0.010 | 0.005 |
| 7. P53 (pos vs. neg) | 0.001 | <0.001 | 0.043 | 0.573 | 0.171 |
| 8. Size | 0.339 | 0.088 | 0.016 | 0.005 | 0.015 |
| 9. Age at Dx | 0.767 | 0.361 | 0.223 | 0.905 | 0.947 |
| 10. SBR Grade | <0.001 | <0.001 | 0.008 | 0.206 | 0.035 |
| 11. Expression subtype | <0.001 | <0.001 | 0.002 | 0.003 | <0.001 |
| 12. Genomic subtype | <0.001 | <0.001 | <0.001 | <0.001 | <0.001 |

^{1,2,3,4}Kruskal-wallis test (1-7, 11, 12), significance of robust linear regression standardized coefficient (8-10
⁵Fisher exact test (1-7, 11, 12), significance of robust linear regression standardized coefficient (8-10)

TABLE 3
Functional characteristics of genes in recurrent amplicons associated with reduced survival duration in breast cancer.
Functional annotation was based on the Human Protein Reference Database at the http address hprd.org. Genes highlighted in
dark gray are associated with reduced survival duration or distant recurrence when over expressed in non-Amplifying tumors.
Genes highlighted in light gray are significantly associated with reduced survival duration or distant recurrence (p < 0.05) when
down regulated in non-Amplifying tumors. Distances to sites of recurrent viral integration were determined from published
information (Akagi et al., 2004). The last column identifies genes having predicted protein folding characteristics suggesting that
they might bedruggable (Russ and Lampel, 2005).

[chemical structure]

[chemical structure]

[chemical structure]

[chemical structure]

[chemical structure]

[chemical structure]

[chemical structure]

[chemical structure]

[chemical structure]

[chemical structure]

[chemical structure]

[chemical structure]

[chemical structure]

[chemical structure]

[chemical structure]

TABLE 4
Univariate p-values with the corresponding 95% confidence intervals for associations with disease-specific survival
and distant recurrence emdpoints and the corresponding multivariate results for those found to be significant in
univariate analyses (p < .05) for at least one of the clinical end points. Only variables individually
significant at p < .05 for at least one of the two end points are included in the multivariate regression.
Stage and SBR Grade are treated as continuous variables rather then factors. In each column pair, the left subcolumn
lists results for disease-specific survival and the right subcolumn lists results for time to distant recurrence.

| | | | Hazard | | | | | | Hazard | | | |
|---|---|---|---|---|---|---|---|---|---|---|---|---|
| | p-value | | ratio | | Confidence interval | | p-value | | ratio | | Confidence interval | |
| | univariate | | univariate | | univariate | | multivariate | | multivariate | | multivariate | |
| Size | <1e−03 | <1e−03 | 1.6 | 1.6 | 1.3, 2 | 1.3, 2 | 0.012 | 0.005 | 1.5 | 1.7 | 1.1, 2.1 | 1.2, 2.4 |
| Nodal status | 0.001 | 0.016 | 3.8 | 2.5 | 1.7, 8.5 | 1.2, 5.4 | 0.034 | 0.1 | 3.0 | 2.4 | 1.1, 8.7 | 0.9, 6.7 |
| Stage | <1e−03 | 0.007 | 2.9 2.3 | 1.7, 5.2 | 1.3, 4.1 | 0.690 | 0.32 | 0.6 | 0.3, 2.3 | 0.2, 1.8 | | |
| | ER | 0.29 | 0.74 | 0.7 | 0.9 | 0.3, 1.4 | 0.4, 1.8 | | | | | |
| PR | 0.14 | 0.13 | 0.6 | 0.6 | 0.3, 1.2 | 0.3, 1.2 | | | | | | |
| ERBB2 | 0.2 | 0.11 | 1.8 2.1 | 0.7, 4.4 | 0.8, 5.3 | | | | | | | |
| P53 | 0.82 | 0.07 | 1.1 | 2.1 | 0.5, 2.5 | 1, 4.5 | | | | | | |
| Ki67 | 0.64 | 0.41 | 1.2 | 1.4 | 0.5, 2.7 | 0.6, 3.4 | | | | | | |
| SBR Grade | 0.095 | 0.11 | 1.6 | 1.6 | 0.9, 2.8 | 0.9, 2.9 | | | | | | |

TABLE 5
Comparison of the association between expression subtypes and survival duration in 3 datastes. Leg-likelihood ratio
test p-value is shown for each model. Basal is the reference in all models. Multivariate models include size and
nodal status. In multivariate analyses, the first value shown in each cell is the p-value and the second is the
ratio of the medians in the compared groups

| | | | Hazard | | Confidence | | | | | | | |
|---|---|---|---|---|---|---|---|---|---|---|---|---|
| | | | ratio | | interval | | p-value | | Hazard ratio | | Confidence interval | |
| p-value | univariate | | univariate | | multivariate | | multivariate | | multivariate | | multivariate | |
| This study | 0.004 | 0.024 | | | | | 2e−05 | 1e−04 | | | | |
| Basal reference | | | 1 | 1 | | | | | 1 | 1 | | |
| ERBB2 | 0.02 | 0.008 | 3.4 | 5.1 | 1.2, 9.3 | 1.5, 116.8 | 0.49 | 0.07 | 1.5 | 3.2 | 0.5, 4.7 | 0.9, 11.6 |
| Luminal A | 0.19 | 0.45 | 0.5 | 0.6 | 0.2, 1.4 | 0.2, 2.1 | 0.1 | 0.32 | 0.4 | 0.5 | 0.1, 1.2 | 0.2, 1.9 |
| Luminal B | 0.18 | 0.88 | 0.24 | 1.1 | 0.03, 1.9 | 0.3, 4.7 | 0.1 | 0.87 | 0.2 | 0.9 | 0.02, 1.4 | 0.2, 3.9 |
| Normal-like | 0.19 | 0.70 | 0.25 | 0.7 | 0.03, 2 | 0.1, 3.7 | 0.14 | 0.63 | 0.2 | 0.7 | 0.03, 1.7 | 0.1, 3.5 |
| van de Vijver et | 0.0006 | 0.18 | | | | | | | | | | |
| al¹ | | | | | | | | | | | | |
| Basal reference | | | 1 | 1 | | | | | | | | |
| ERBB2 | 0.14 | 0.95 | 0.6 | 1 | 0.3, 1.2 | 0.5, 1.8 | | | | | | |
| Luminal A | 3.5e−05 | 0.1 | 0.3 | 0.6 | 0.2, 0.5 | 0.4, 1.1 | | | | | | |
| Luminal B | 0.23 | 0.7 | 0.6 | 1.1 | 0.3, 1.3 | 0.6, 2.3 | | | | | | |
| Normal-like | 0.01 | 0.23 | 0.3 | 0.7 | 0.2, 0.8 | 0.3, 1.4 | | | | | | |
| Sorlie et al² | 2e−06 | | | | | | | | | | | |
| Basal ref | | | 1 | | | | | | | | | |
| ERBB2 0.83 | | | 1.11 | | 0.4, 2.9 | | | | | | | |
| Luminal A | 0.001 | | .04 | | 0.005, .3 | | | | | | | |
| Luminal B | 0.27 | | 0.6 | | 0.2, 1.6 | | | | | | | |
| Normal-like 1 | | | 0 | | 0, Inf | | | | | | | |

¹van de Vijver MJ, He YD, van't Veer LJ, Dai H. Hart AA, et al. 2002) A gene-expression signature as a predictor of survival in breast cancer. N Engl J Med 347. 1999-2009.
²Sorlie T, Perou CM, Tibshirani R, Aas T, Geisler S, et al. 2001) Gene expression patterns of breast carcinomas distinguishing tumor subclasses with clinical implications. Proc Natl Acad Sci U S A 98: 10869-10874.

TABLE 6
Identities of 1432 gene transcripts showing significant associations
between genome copy numbers measured using array CGH and
transcript levels measured using Affymetrix U133A expression
arrays in 101 primary breast tumors. Data will be available through
CaBIG and a public web site.

| | Kbp | Kbp | Gene | Cor |
|---|---|---|---|---|
| Chr | Chrom | Genome | transcript | Pearson |
| 1 | 6295 | 6295 | FLJ23323 | 0.54 |
| 1 | 7731 | 7731 | PARK7 | 0.48 |
| 1 | 10231 | 10231 | DFFA | 0.46 |
| 1 | 10676 | 10676 | FRAP1 | 0.53 |
| 1 | 11750 | 11750 | MFN2 | 0.51 |
| 1 | 12047 | 12047 | VPS13D | 0.45 |
| 1 | 13394 | 13394 | PRDM2 | 0.56 |
| 1 | 15216 | 15216 | KIAA0962 | 0.48 |
| 1 | 15537 | 15537 | SPEN | 0.48 |
| 1 | 15958 | 15958 | FBXO42 | 0.53 |
| 1 | 26364 | 26364 | DHDDS | 0.47 |
| 1 | 27339 | 27339 | WASF2 | 0.49 |
| 1 | 32619 | 32619 | RBBP4 | 0.52 |
| 1 | 32744 | 32744 | YARS | 0.46 |
| 1 | 36349 | 36349 | MRPS15 | 0.46 |
| 1 | 37460 | 37460 | GNL2 | 0.54 |
| 1 | 37892 | 37892 | CGI-94 | 0.53 |
| 1 | 38718 | 38718 | RRAGC | 0.51 |
| 1 | 39210 | 39210 | BACF1 | 0.48 |
| 1 | 39440 | 39440 | PABPC4 | 0.59 |
| 1 | 39618 | 39618 | PPIE | 0.59 |
| 1 | 39720 | 39720 | TRIT1 | 0.58 |
| 1 | 40040 | 40040 | RLF | 0.64 |
| 1 | 40329 | 40329 | ZNF643 | 0.67 |
| 1 | 40500 | 40500 | RIMS3 | 0.65 |
| 1 | 40571 | 40571 | NFYC | 0.59 |
| 1 | 40859 | 40859 | CTPS | 0.51 |
| 1 | 40906 | 40906 | SCMH1 | 0.60 |
| 1 | 42561 | 42561 | LOC442610 | 0.54 |
| 1 | 42561 | 42561 | NSEP1 | 0.58 |
| 1 | 42646 | 42646 | C1orf50 | 0.61 |
| 1 | 43043 | 43043 | EBNA1BP2 | 0.47 |
| 1 | 43242 | 43242 | ELOVL1 | 0.58 |
| 1 | 43263 | 43263 | MED8 | 0.56 |
| 1 | 43322 | 43322 | KIAA0467 | 0.47 |
| 1 | 43410 | 43410 | PTPRF | 0.51 |
| 1 | 43529 | 43529 | LMLD2A | 0.62 |
| 1 | 43849 | 43849 | DPH2L2 | 0.53 |
| 1 | 43858 | 43858 | B4GALT2 | 0.45 |
| 1 | 44100 | 44100 | PRNPIP | 0.61 |
| 1 | 44511 | 44511 | FLJ0597 | 0.45 |
| 1 | 44730 | 44730 | EIF2B3 | 0.63 |
| 1 | 44891 | 44891 | UROD | 0.45 |
| 1 | 45208 | 45208 | MUTYH | 0.46 |
| 1 | 45463 | 45463 | SP192 | 0.57 |
| 1 | 53063 | 53063 | MAGOH | 0.45 |
| 1 | 54063 | 54063 | SSBP3 | 0.45 |
| 1 | 54551 | 54551 | TTC4 | 0.58 |
| 1 | 54902 | 54902 | USP24 | 0.56 |
| 1 | 61578 | 61578 | INADL | 0.51 |
| 1 | 67248 | 67248 | PAI-RBP1 | 0.47 |
| 1 | 77453 | 77453 | ZZZ3 | 0.54 |
| 1 | 84532 | 84532 | SSX2IP | 0.47 |
| 1 | 87217 | 87217 | LMO4 | 0.52 |
| 1 | 88617 | 88617 | PKN2 | 0.47 |
| 1 | 88786 | 88786 | GTF2B | 0.49 |
| 1 | 89754 | 89754 | LRRC5 | 0.50 |
| 1 | 92184 | 92184 | GLMN | 0.51 |
| 1 | 92769 | 92769 | RPL5 | 0.63 |
| 1 | 93017 | 93017 | M96 | 0.49 |
| 1 | 93807 | 93807 | ERBP | 0.48 |
| 1 | 100918 | 100918 | CGI-30 | 0.49 |
| 1 | 109055 | 109055 | SARS | 0.44 |
| 1 | 113747 | 113747 | DCLRE1B | 0.49 |
| 1 | 114239 | 114239 | TRIM33 | 0.64 |
| 1 | 114409 | 114409 | BCAS2 | 0.61 |
| 1 | 114558 | 114558 | UNR | 0.50 |
| 1 | 114614 | 114614 | FLJ21168 | 0.74 |
| 1 | 117414 | 117414 | MAN1A2 | 0.49 |
| 1 | 143265 | 143265 | PEX11B | 0.57 |
| 1 | 143341 | 143341 | POLR3C | 0.51 |
| 1 | 144520 | 144520 | BCL9 | 0.51 |
| 1 | 147088 | 147088 | CGI-143 | 0.46 |
| 1 | 147112 | 147112 | SF3B4 | 0.63 |
| 1 | 147256 | 147256 | VPS45A | 0.47 |
| 1 | 147454 | 147454 | APH1A | 0.52 |
| 1 | 147661 | 147661 | KIAA0460 | 0.52 |
| 1 | 147677 | 147677 | TARSL1 | 0.57 |
| 1 | 147677 | 147677 | TARSL1 | 0.57 |
| 1 | 147813 | 147813 | ENSA | 0.45 |
| 1 | 147835 | 147835 | GOLPH3L | 0.51 |
| 1 | 148116 | 148116 | SETDB1 | 0.49 |
| 1 | 148355 | 148355 | SCNM1 | 0.48 |
| 1 | 148366 | 148366 | TCFL1 | 0.59 |
| 1 | 148481 | 148481 | PIK4CB | 0.53 |
| 1 | 148592 | 148592 | POGZ | 0.56 |
| 1 | 148801 | 148801 | SNX27 | 0.57 |
| 1 | 148949 | 148949 | MRPL9 | 0.51 |
| 1 | 153241 | 153241 | MAPBPIP | 0.55 |
| 1 | 153383 | 153383 | KIAA0446 | 0.47 |
| 1 | 153400 | 153400 | PMF1 | 0.46 |
| 1 | 153909 | 153909 | FLJ12671 | 0.52 |
| 1 | 153924 | 153294 | MRPL24 | 0.55 |
| 1 | 153954 | 153954 | PRCC | 0.54 |
| 1 | 154122 | 154122 | ARGHEF11 | 0.44 |
| 1 | 157392 | 157392 | PEA15 | 0.49 |
| 1 | 157463 | 157463 | PEX19 | 0.54 |
| 1 | 157476 | 157476 | COPA | 0.49 |
| 1 | 157530 | 157530 | NCSTN | 0.55 |
| 1 | 158287 | 158287 | PFDN2 | 0.47 |
| 1 | 158305 | 158305 | NIT1 | 0.49 |
| 1 | 158306 | 158306 | DEDD | 0.50 |
| 1 | 158340 | 158340 | Ufc1 | 0.57 |
| 1 | 158346 | 158346 | USP21 | 0.56 |
| 1 | 158353 | 158353 | PPOX | 0.46 |
| 1 | 158358 | 158358 | B4GALT3 | 0.65 |
| 1 | 158386 | 158386 | NDUFS2 | 0.64 |
| 1 | 158501 | 158501 | SDHC | 0.56 |
| 1 | 158907 | 158907 | DUSP12 | 0.53 |
| 1 | 158923 | 158923 | ATF6 | 0.52 |
| 1 | 159719 | 159719 | UAP1 | 0.54 |
| 1 | 162819 | 162819 | ALDH9A1 | 0.45 |
| 1 | 162884 | 162884 | LOC54499 | 0.53 |
| 1 | 163996 | 163996 | POGK | 0.54 |
| 1 | 166525 | 166525 | BLZF1 | 0.44 |
| 1 | 166949 | 166949 | MGC9064 | 0.45 |
| 1 | 167010 | 167010 | SCYL3 | 0.53 |
| 1 | 168721 | 168721 | BAT2D1 | 0.47 |
| 1 | 168901 | 168909 | VAMP4 | 0.51 |
| 1 | 168990 | 168990 | KIAA0859 | 0.66 |
| 1 | 169650 | 169650 | PIGC | 0.61 |
| 1 | 170923 | 170923 | KLHL20 | 0.68 |
| 1 | 172209 | 172209 | CACYBP | 0.48 |
| 1 | 172223 | 172223 | MRPS14 | 0.57 |
| 1 | 172365 | 172365 | KIAA0040 | 0.47 |
| 1 | 177071 | 177071 | LOC163590 | 0.46 |
| 1 | 177091 | 177091 | LAP18 | 0.52 |
| 1 | 178182 | 178182 | STX6 | 0.56 |
| 1 | 181899 | 181899 | C1orf22 | 0.45 |
| 1 | 183522 | 183522 | TPR | 0.57 |
| 1 | 183584 | 183854 | C1orf27 | 0.447 |
| 1 | 190317 | 190317 | SSA2 | 0.49 |
| 1 | 197664 | 197664 | ZNF281 | 0.50 |
| 1 | 198107 | 198107 | KIAA1078 | 0.48 |
| 1 | 199087 | 199087 | IPO9 | 0.53 |
| 1 | 199240 | 199240 | RMPEP | 0.53 |
| 1 | 199985 | 199985 | JARD1B | 0.55 |
| 1 | 200136 | 200136 | RABIF | 0.65 |
| 1 | 200198 | 200198 | ADIPOR1 | 0.58 |
| 1 | 200281 | 200281 | C1ord37 | 0.51 |
| 1 | 201008 | 201008 | SNRPE | 0.50 |
| 1 | 203849 | 203849 | LGTN | 0.61 |
| 1 | 205009 | 205009 | MCP | 0.57 |
| 1 | 207038 | 207038 | IRF56 | 0.51 |
| 1 | 207081 | 207081 | MGC29875 | 0.58 |
| 1 | 208513 | 208513 | RCOR3 | 0.48 |
| 1 | 208998 | 208998 | LPGAT1 | 0.46 |
| 1 | 209663 | 209663 | SCIRP10 | 0.47 |
| 1 | 210225 | 210225 | LOC90806 | 0.55 |
| 1 | 210281 | 210281 | RPS6KC1 | 0.45 |
| 1 | 212797 | 212797 | KCTD3 | 0.58 |
| 1 | 215515 | 215515 | CGI-115 | 0.46 |
| 1 | 217330 | 217330 | FLJ10326- | 0.55 |
| 1 | 217380 | 217380 | RAB3- | 0.59 |
| | | | GAP150 | |
| 1 | 217978 | 217978 | FLJ20605 | 0.50 |
| 1 | 221276 | 221276 | FBXO28 | 0.54 |
| 1 | 221346 | 221346 | DEGS1 | 0.52 |
| 1 | 221390 | 221390 | NVL | 0.51 |
| 1 | 221519 | 221519 | HSPC163 | 0.49 |
| 1 | 221550 | 221550 | WDR26 | 0.45 |
| 1 | 223225 | 223225 | H3F3A | 0.54 |
| 1 | 223307 | 223307 | ACBD3 | 0.61 |
| 1 | 225245 | 225245 | ARF1 | 0.52 |
| 1 | 225263 | 225263 | C1orf35 | 0.47 |
| 1 | 225303 | 225303 | GUK1 | 0.49 |
| 1 | 226368 | 226368 | RAB4A | 0.53 |
| 1 | 226402 | 226402 | APHAR | 0.50 |
| 1 | 226538 | 226538 | NUP133 | 0.48 |
| 1 | 228412 | 228412 | GNPAT | 0.55 |
| 1 | 228412 | 228412 | GNPAT | 0.55 |
| 1 | 232533 | 232533 | GGPS1 | 0.55 |
| 1 | 232572 | 232572 | TBCE | 0.55 |
| 1 | 233755 | 233755 | FLJ10359 | 0.49 |
| 1 | 241519 | 241519 | ADSS | 0.48 |
| 1 | 243651 | 243651 | TFB2M | 0.47 |
| 1 | 245947 | 245947 | ZNF672 | 0.51 |
| 2 | 9651 | 255779 | ADAM17 | 0.44 |
| 2 | 9651 | 255779 | LOC285148 | 0.50 |
| 2 | 9746 | 255874 | YWHAG | 0.54 |
| 2 | 15329 | 261457 | NAG | 0.64 |
| 2 | 15754 | 261881 | DDX1 | 0.68 |
| 2 | 16718 | 252846 | FAM49A | 0.51 |
| 2 | 28945 | 285073 | SFRS7 | 0.45 |
| 2 | 64556 | 310784 | HSPC159 | 0.49 |
| 2 | 85818 | 331946 | USP39 | 0.45 |
| 2 | 96486 | 324614 | BRRN1 | 0.47 |
| 2 | 172051 | 418179 | TLK1 | 0.44 |
| 2 | 238888 | 485016 | LRRFIP1 | 0.56 |
| 3 | 3167 | 492911 | CRBN | 0.52 |
| 3 | 4320 | 494064 | SETMAR | 0.45 |
| 3 | 5139 | 494883 | ARL10C | 0.52 |
| 3 | 10318 | 500062 | SEC13L1 | 0.46 |
| 3 | 12574 | 502317 | MKRN2 | 0.51 |
| 3 | 12600 | 502344 | RAF1 | 0.49 |
| 3 | 13333 | 503077 | NUP210 | 0.52 |
| 3 | 14162 | 503906 | XPC | 0.67 |
| 3 | 14964 | 504708 | NR2C2 | 0.52 |
| 3 | 38041 | 527785 | ACAA1 | 0.45 |
| 3 | 39054 | 528798 | WDR48 | 0.49 |
| 3 | 39413 | 529157 | RPSA | 0.46 |
| 3 | 40459 | 530203 | RPL14 | 0.50 |
| 3 | 44978 | 534722 | EXOSC7 | 0.47 |
| 3 | 48748 | 538942 | PRKAR2A | 0.59 |
| 3 | 48919 | 538663 | ARIH2 | 0.45 |
| 3 | 49026 | 538770 | FLJ20259 | 0.44 |
| 3 | 49092 | 538836 | QARS | 0.52 |
| 3 | 50566 | 540310 | HEMK1 | 0.45 |
| 3 | 51976 | 541720 | ACY1 | 0.45 |
| 3 | 51986 | 541730 | RPL29 | 0.45 |
| 3 | 52247 | 541991 | PRO2730 | 0.47 |
| 3 | 52393 | 542137 | BAP1 | 0.46 |
| 3 | 53279 | 543023 | DCP1A | 0.52 |
| 3 | 72347 | 562091 | RYBP | 0.50 |
| 3 | 72719 | 562463 | SHQ1 | 0.62 |
| 3 | 109643 | 599386 | DZIP3 | 0.59 |
| 3 | 114759 | 604503 | MAK3 | 0.49 |
| 3 | 114787 | 604531 | ATP6V1A | 0.50 |
| 3 | 127477 | 617221 | MGC11349 | 0.46 |
| 3 | 128613 | 618357 | GPR175 | 0.49 |
| 3 | 129092 | 618836 | SEC61A1 | 0.56 |
| 3 | 129660 | 619404 | RPN1 | 0.53 |
| 3 | 129766 | 619510 | RAB7 | 0.54 |
| 3 | 130319 | 620062 | DC12 | 0.49 |
| 3 | 130471 | 620215 | MBD4 | 0.55 |
| 3 | 130690 | 520434 | TMCC1 | 0.49 |
| 3 | 135197 | 624941 | RYK | 0.48 |
| 3 | 135835 | 625579 | EPHB1 | 0.54 |
| 3 | 137005 | 626749 | PPP2R3A | 0.58 |
| 3 | 137902 | 627646 | NCK1 | 0.47 |
| 3 | 139534 | 629278 | Cap70 | 0.45 |
| 3 | 140384 | 630128 | MRPS22 | 0.55 |
| 3 | 142010 | 631754 | FLJ10618 | 0.54 |
| 3 | 14401 | 633785 | SR140 | 0.48 |
| 3 | 150030 | 639774 | GYG | 0.56 |
| 3 | 150557 | 640301 | WWTR1 | 0.57 |
| 3 | 160312 | 650056 | SCHIP1 | 0.44 |
| 3 | 181951 | 671695 | FXR1 | 0.56 |
| 3 | 185194 | 674938 | DVL3 | 0.49 |
| 3 | 187585 | 677329 | FLJ10560 | 0.46 |
| 3 | 197793 | 687537 | PAK2 | 0.58 |
| 3 | 197988 | 687731 | SENP5 | 0.59 |
| 3 | 197989 | 687733 | NCBP2 | 0.57 |
| 3 | 198098 | 687842 | DLG1 | 0.54 |
| 3 | 198725 | 688469 | KIAA0226 | 0.47 |
| 4 | 1195 | 690283 | CTBP1 | 0.48 |
| 4 | 1946 | 691034 | WHSC2 | 0.49 |
| 4 | 2659 | 691747 | C4ord8 | 0.59 |
| 4 | 2775 | 691863 | TNIP2 | 0.49 |
| 4 | 2877 | 691965 | ADD1 | 0.61 |
| 4 | 2964 | 692052 | TETRAN | 0.47 |
| 4 | 4486 | 692574 | STX18 | 0.56 |
| 4 | 54159 | 743247 | FIP1L1 | 0.60 |
| 4 | 56178 | 745266 | TPARL | 0.46 |
| 4 | 56214 | 745302 | CLOCK | 0.65 |
| 4 | 68488 | 757576 | FLJ10808 | 0.55 |
| 4 | 69182 | 758270 | YT521 | 0.53 |
| 4 | 69746 | 758834 | TMPRSS11E | 0.52 |
| 4 | 72020 | 761108 | SAS10 | 0.61 |
| 4 | 72054 | 761142 | LOC441022 | 0.59 |
| 4 | 72054 | 761142 | RIPX | 0.49 |
| 4 | 72152 | 761239 | GRSF1 | 0.54 |
| 4 | 72326 | 761414 | DCK | 0.44 |
| 4 | 76865 | 765953 | RCHY1 | 0.44 |
| 4 | 77026 | 766114 | G3BP2 | 0.55 |
| 4 | 77108 | 766196 | VDP | 0.54 |
| 4 | 77329 | 766417 | SDAD1 | 0.60 |
| 4 | 83733 | 772821 | HNRPD | 0.47 |
| 4 | 101279 | 790367 | FLJ14281 | 0.44 |
| 4 | 104176 | 793264 | UBE2D3 | 0.54 |
| 4 | 140556 | 8229644 | ELF2 | 0.45 |
| 4 | 140789 | 829877 | NDUFC1 | 0.46 |
| 4 | 140800 | 8229888 | NARG1 | 0.48 |
| 4 | 142720 | 831808 | ZNF330 | 0.45 |
| 4 | 185122 | 874210 | ING2 | 0.45 |
| 5 | 271 | 881091 | SDHA | 0.45 |
| 5 | 496 | 881316 | SEC6L1 | 0.46 |
| 5 | 946 | 881766 | TRIP13 | 0.47 |
| 5 | 1514 | 882334 | FLJ12443 | 0.48 |
| 5 | 1854 | 882674 | NDUFS6 | 0.49 |
| 5 | 31447 | 912267 | RNASE3L | 0.69 |
| 5 | 31578 | 912398 | FLJ11193 | 0.47 |
| 5 | 32273 | 913093 | MTMR12 | 0.54 |
| 5 | 32273 | 913093 | MTMR12 | 0.54 |
| 5 | 37022 | 917842 | NIPBL | 0.46 |
| 5 | 37152 | 917972 | FLJ13231 | 0.50 |
| 5 | 37425 | 918245 | FLJ10233 | 0.57 |
| 5 | 43169 | 923989 | ZNF131 | 0.49 |
| 5 | 66426 | 947246 | MAST4 | 0.46 |
| 5 | 77740 | 958560 | SCAMP1 | 0.45 |
| 5 | 80800 | 961620 | SSBP2 | 0.54 |
| 5 | 80800 | 961620 | 0.54 | |
| 5 | 118864 | 999684 | HSD17B4 | 0.45 |
| 5 | 131782 | 1012602 | SLC22A5 | 0.52 |
| 5 | 133938 | 1014757 | PHF15 | 0.46 |
| 5 | 134150 | 1014970 | CAMLG | 0.50 |
| 5 | 134746 | 1015566 | H2AFY | 0.48 |
| 5 | 139934 | 1020754 | ANKHD1 | 0.49 |
| 5 | 14909 | 1030229 | KIAA0194 | 0.48 |
| 5 | 179091 | 1059911 | RUFY1 | 0.50 |
| 5 | 179270 | 1060089 | MAML1 | 0.60 |
| 5 | 171399 | 1060219 | KIAA0676 | 0.51 |
| 6 | 10488 | 1072343 | PAK1P1 | 0.47 |
| 6 | 20510 | 1062365 | E2F3 | 0.62 |
| 6 | 24532 | 1086387 | MRS2L | 0.51 |
| 6 | 24775 | 1086630 | THEM2 | 0.48 |
| 6 | 24883 | 1086738 | GMNN | 0.54 |
| 6 | 25705 | 1088560 | ABT1 | 0.45 |
| 6 | 31738 | 1093593 | CSNK2B | 0.51 |
| 6 | 32024 | 1093879 | RDBP | 0.51 |
| 6 | 36042 | 1097897 | MAPK14 | 0.49 |
| 6 | 36509 | 1098363 | STK38 | 0.49 |
| 6 | 41936 | 1103791 | BYSL | 0.45 |
| 6 | 43029 | 1104884 | KLHDC3 | 0.54 |
| 6 | 43450 | 1105305 | ABCC10 | 0.45 |
| 6 | 71373 | 1133228 | SMAP1 | 0.55 |
| 6 | 75943 | 1137798 | COXA7A2 | 0.48 |
| 6 | 76308 | 1138163 | SENP6 | 0.54 |
| 6 | 83773 | 1145626 | KIAA1117 | 0.50 |
| 6 | 87967 | 1149821 | ZNF292 | 0.45 |
| 6 | 88042 | 1149897 | C6orf62 | 0.447 |
| 6 | 89316 | 1151170 | RNGTT | 0.46 |
| 6 | 90349 | 1152204 | MDN1 | 0.46 |
| 6 | 91190 | 1153045 | MAP3K7 | 0.45 |
| 6 | 99894 | 1161749 | C6orf111 | 0.48 |
| 6 | 105771 | 1167626 | PREP | 0.64 |
| 6 | 106678 | 1168533 | APG5L | 0.73 |
| 6 | 107123 | 1168978 | QRSL1 | 0.61 |
| 6 | 107519 | 1169374 | C6orf210 | 0.59 |
| 6 | 106260 | 1170115 | SEC63 | 0.69 |
| 6 | 108522 | 1170377 | SNX3 | 0.52 |
| 6 | 106927 | 1170782 | FOXO3A | 0.60 |
| 6 | 109829 | 1171684 | ZBTB24 | 0.57 |
| 6 | 110547 | 1172402 | CDC40 | 0.55 |
| 6 | 110977 | 1172832 | CDC2L6 | 0.55 |
| 6 | 111242 | 1173096 | AMD1 | 0.51 |
| 6 | 111666 | 1173521 | REV3L | 0.48 |
| 6 | 111864 | 1173719 | RAF3IP2 | 0.61 |
| 6 | 114307 | 1176162 | HDAC2 | 0.58 |
| 6 | 119180 | 1181035 | C6orf61 | 0.66 |
| 6 | 119203 | 1181057 | ASF1A | 0.63 |
| 6 | 119262 | 1181116 | C6orf60 | 0.55 |
| 6 | 125577 | 1187432 | C6orf74 | 0.54 |
| 6 | 131876 | 1193731 | CRSP3 | 0.59 |
| 6 | 132762 | 1194617 | STX7 | 0.62 |
| 6 | 134255 | 1196110 | TBPL1 | 0.53 |
| 6 | 135219 | 1197074 | ALDH8A1 | 0.45 |
| 6 | 135266 | 1197121 | HBS1L | 0.59 |
| 6 | 138706 | 1200561 | HEBP2 | 0.57 |
| 6 | 143753 | 1205608 | PEX3 | 0.49 |
| 6 | 145927 | 1207782 | EPM2A | 0.52 |
| 6 | 160299 | 1222154 | IGF2R | 0.49 |
| 6 | 170701 | 1232556 | PSMB1 | 0.47 |
| 6 | 170743 | 1232598 | PDCD2 | 0.45 |
| 7 | 2019 | 1234788 | FTSJ2 | 0.49 |
| 7 | 2139 | 1234908 | EIF3S9 | 0.46 |
| 7 | 2188 | 1234957 | CHST12 | 0.45 |
| 7 | 2343 | 1235113 | IQCE | 0.49 |
| 7 | 5808 | 1238577 | EIF2AK1 | 0.50 |
| 7 | 6607 | 1239376 | C7orf28B | 0.44 |
| 7 | 7352 | 1240121 | FLJ203223 | 0.54 |
| 7 | 7898 | 1240667 | ICA1 | 0.51 |
| 7 | 27522 | 1260291 | TAX1BP1 | 0.53 |
| 7 | 43412 | 1276181 | FLJ10803 | 0.49 |
| 7 | 43656 | 1276426 | URG4 | 0.54 |
| 7 | 44164 | 1276933 | NUDCD3 | 0.59 |
| 7 | 44346 | 1277116 | DDX56 | 0.56 |
| 7 | 55861 | 1288631 | OCT6A | 0.45 |
| 7 | 72129 | 1304899 | NSUN5 | 0.53 |
| 7 | 72129 | 1204899 | WBSCR20B | 0.47 |
| 7 | 72267 | 1205036 | BAZ1B | 0.47 |
| 7 | 72363 | 1305132 | BCL7B | 0.47 |
| 7 | 72510 | 1305279 | WBSCR20C | 0.50 |
| 7 | 86567 | 1319336 | TP53AP1 | 0.53 |
| 7 | 91689 | 1324458 | GATAD1 | 0.53 |
| 7 | 95930 | 1328699 | SHFM1 | 0.47 |
| 7 | 98088 | 1330857 | TRRAP | 0.50 |
| 7 | 98605 | 1331374 | PSAP1 | 0.51 |
| 7 | 98618 | 1331387 | G10 | 0.59 |
| 7 | 98628 | 1331398 | PTCD1 | 0.60 |
| 7 | 98667 | 1331437 | ATP5J2 | 0.56 |
| 7 | 98667 | 1331437 | ATP5J2 | 0.56 |
| 7 | 98714 | 1331483 | ZFP95 | 0.49 |
| 7 | 99822 | 1332591 | MOSPD3 | 0.57 |
| 7 | 99829 | 1332599 | TFR2 | 0.49 |
| 7 | 99915 | 1332685 | POP7 | 0.47 |
| 7 | 100012 | 1332781 | EPHB4 | 0.61 |
| 7 | 100062 | 1332831 | SLC12A9 | 0.52 |
| 7 | 100422 | 1333191 | ZNHIT1 | 0.62 |
| 7 | 101597 | 1334367 | PRKRIP1 | 0.50 |
| 7 | 101674 | 1334444 | POLR2J | 0.47 |
| 7 | 102498 | 1335268 | PMPCB | 0.48 |
| 1 | 102513 | 1335283 | ZRF1 | 0.65 |
| 7 | 103327 | 1336097 | ORC5L | 0.54 |
| 7 | 104733 | 1337503 | RINT-1 | 0.52 |
| 7 | 128057 | 1360826 | ATP6V1F | 0.47 |
| 7 | 128151 | 1360921 | TNPO3 | 0.46 |
| 7 | 138459 | 1371229 | LUC7L2 | 0.46 |
| 7 | 139560 | 1372330 | MKRN1 | 0.59 |
| 7 | 140113 | 1372883 | MRPS33 | 0.49 |
| 7 | 140663 | 1373432 | MULK | 0.55 |
| 7 | 149460 | 1382229 | REPIN1 | 0.46 |
| 7 | 150148 | 1382918 | SLC4A2 | 0.51 |
| 7 | 150165 | 1382935 | FASTK | 0.47 |
| 7 | 150301 | 1383071 | ABCF2 | 0.50 |
| 7 | 150556 | 1383325 | RHEB | 0.51 |
| 7 | 151115 | 1383884 | GALNT11 | 0.47 |
| 7 | 158547 | 1389316 | DNAJB6 | 0.45 |
| 8 | 1808 | 1393123 | ARGHEF10 | 0.47 |
| 8 | 9676 | 1400991 | TNKS | 0.57 |
| 8 | 9949 | 1401264 | MSRA | 0.57 |
| 8 | 11698 | 1403013 | FDFT1 | 0.50 |
| 8 | 17791 | 1409106 | PCM1 | 0.60 |
| 8 | 21799 | 1413114 | XPO7 | 0.48 |
| 8 | 21979 | 1413294 | RAI16 | 0.50 |
| 8 | 21986 | 1413301 | FLJ22494 | 0.49 |
| 8 | 22500 | 1413815 | BIN3 | 0.60 |
| 8 | 22900 | 1414215 | TNFRSF10B | 0.52 |
| 8 | 23126 | 1414441 | CHMP7 | 0.59 |
| 8 | 23168 | 1414482 | LOC203069 | 0.64 |
| 8 | 23312 | 1314627 | ENTPD4 | 0.44 |
| 8 | 26171 | 1417486 | PPP2R2A | 0.58 |
| 8 | 26262 | 1417577 | BNIP3L | 0.47 |
| 8 | 27371 | 1418685 | EPHX2 | 0.58 |
| 8 | 27613 | 1418928 | FLJ10853 | 0.63 |
| 8 | 48223 | 1439538 | KIAA0146 | 0.50 |
| 8 | 48923 | 1440238 | MCM4 | 0.48 |
| 8 | 48971 | 1440286 | UBE2V2 | 0.49 |
| 8 | 53585 | 1444900 | RB1CC1 | 0.46 |
| 8 | 54678 | 1445993 | ATP6V1H | 0.52 |
| 8 | 54929 | 1446244 | TCEA1 | 0.46 |
| 8 | 55098 | 1446413 | MRPL15 | 0.45 |
| 8 | 56736 | 1448051 | NCOA6IP | 0.55 |
| 8 | 57174 | 1448489 | CHCHD7 | 0.47 |
| 8 | 64175 | 1455490 | YTHDF3 | 0.49 |
| 8 | 66607 | 1457922 | CHPPR | 0.51 |
| 8 | 67391 | 1458706 | RRS1 | 0.59 |
| 8 | 73971 | 1465286 | TERF1 | 0.55 |
| 8 | 80881 | 1472196 | MRPS28 | 0.49 |
| 8 | 81448 | 1472763 | ZBTB10 | 0.45 |
| 8 | 82620 | 1473935 | IMPA1 | 0.53 |
| 8 | 82664 | 1473979 | ZFAND1 | 0.61 |
| 8 | 87443 | 1478758 | CGI-90 | 0.46 |
| 8 | 90902 | 1482217 | NBS1 | 0.50 |
| 8 | 95341 | 1486656 | RAD54B | 0.50 |
| 8 | 95818 | 1487133 | FLJ20530 | 0.56 |
| 8 | 95849 | 1487164 | CCNE2 | 0.48 |
| 8 | 97199 | 1488514 | UQCR8 | 0.59 |
| 8 | 97208 | 1488523 | CGI-12 | 0.60 |
| 8 | 97231 | 1488546 | PTDSS1 | 0.60 |
| 8 | 98658 | 1489973 | LYRIC | 0.70 |
| 8 | 98744 | 1490059 | LAPTM4B | 0.48 |
| 8 | 99011 | 1490325 | RPL30 | 0.57 |
| 8 | 99071 | 1490386 | HRSP12 | 0.62 |
| 8 | 99097 | 1490412 | POP1 | 0.63 |
| 8 | 99423 | 1490738 | STK3 | 0.59 |
| 8 | 101119 | 1492434 | POLR2K | 0.66 |
| 8 | 101127 | 1492442 | SPAG1 | 0.48 |
| 8 | 101226 | 1492541 | RNF19 | 0.49 |
| 8 | 101490 | 1492805 | LOC157567 | 0.57 |
| 8 | 101672 | 1492987 | PABPC1 | 0.63 |
| 8 | 101887 | 1493202 | YWHAZ | 0.71 |
| 8 | 102136 | 1493451 | LOC157562 | 0.75 |
| 8 | 102168 | 1493483 | LOC51123 | 0.71 |
| 8 | 102462 | 1493776 | TFCP2L3 | 0.53 |
| 8 | 103223 | 4945438 | EDD | 0.62 |
| 8 | 103797 | 1495112 | AZIN1 | 0.58 |
| 8 | 103990 | 1495305 | ATP6V1C1 | 0.56 |
| 8 | 104268 | 1495583 | FZD6 | 0.47 |
| 8 | 104367 | 1495682 | MFTC | 0.53 |
| 8 | 104384 | 1495698 | Gm83 | 0.62 |
| 8 | 109412 | 1500727 | KIAA0103 | 0.55 |
| 8 | 110509 | 1501824 | EBAG9 | 0.64 |
| 8 | 117614 | 1508929 | EIF3S3 | 0.52 |
| 8 | 117815 | 1509130 | RAD21 | 0.59 |
| 8 | 120700 | 1512015 | TAF2 | 0.53 |
| 8 | 120803 | 1512118 | DCC1 | 0.54 |
| 8 | 121365 | 1512680 | MRPL13 | 0.61 |
| 8 | 121365 | 1512680 | MRPL13 | 0.61 |
| 8 | 123984 | 1515299 | DERL1 | 0.71 |
| 8 | 124114 | 1515429 | MGC21654 | 0.63 |
| 8 | 124289 | 1515604 | ATAD2 | 0.58 |
| 8 | 124386 | 1515700 | FLJ10204 | 0.60 |
| 8 | 125420 | 1516735 | FLJ20772 | 0.68 |
| 8 | 125444 | 1516759 | RNF139 | 0.58 |
| 8 | 125968 | 1517283 | SQLE | 0.63 |
| 8 | 125993 | 1517308 | KIAA0196 | 0.52 |
| 8 | 128705 | 1520020 | MYC | 0.51 |
| 8 | 128965 | 1520280 | PVT1 | 0.66 |
| 8 | 120810 | 1522125 | FAM498 | 0.68 |
| 8 | 132981 | 1524296 | KIAA0143 | 0.60 |
| 8 | 133747 | 1525062 | PHF20L1 | 0.60 |
| 8 | 134428 | 1525743 | ST3GAL1 | 0.48 |
| 8 | 141504 | 1532819 | EIF2C2 | 0.66 |
| 8 | 141640 | 1532954 | PTK2 | 0.68 |
| 8 | 142403 | 1533718 | PTP4A3 | 0.45 |
| 8 | 143807 | 1535122 | JRK | 0.54 |
| 8 | 143872 | 1535187 | LOC51337 | 0.60 |
| 8 | 144479 | 1535794 | FLJ14129 | 0.63 |
| 8 | 144554 | 1535869 | MGC3113 | 0.54 |
| 8 | 144625 | 1535940 | ZC3HDC3 | 0.68 |
| 8 | 144746 | 1536061 | GSDMDC1 | 0.57 |
| 8 | 144767 | 1536082 | EEF1D | 0.68 |
| 8 | 144792 | 1536106 | PYCRL | 0.70 |
| 8 | 144800 | 1536115 | TSTA3 | 0.52 |
| 8 | 144837 | 1536152 | ZNF623 | 0.76 |
| 8 | 144979 | 1536294 | SCRIB | 0.78 |
| 8 | 145005 | 1536319 | SIAHBP1 | 0.82 |
| 8 | 145046 | 1536361 | EPPK1 | 0.45 |
| 8 | 145212 | 1536527 | OPLAH | 0.63 |
| 8 | 145240 | 1536554 | EXOSC4 | 0.82 |
| 8 | 145244 | 1536558 | GPAA1 | 0.70 |
| 8 | 145256 | 1536571 | CYC1 | 0.74 |
| 8 | 145260 | 1536574 | Sharpin | 0.62 |
| 8 | 145443 | 1536758 | LOC51236 | 0.72 |
| 8 | 145491 | 1536806 | BOP1 | 0.71 |
| 8 | 145520 | 1536835 | HSF1 | 0.78 |
| 8 | 145545 | 1536860 | DGAT1 | 0.53 |
| 8 | 145584 | 1536899 | FBXL6 | 0.72 |
| 8 | 145587 | 1536902 | GPR172A | 0.74 |
| 8 | 145623 | 1536938 | CPSF1 | 0.68 |
| 8 | 145643 | 1536958 | SLC39A4 | 0.59 |
| 8 | 145654 | 1536969 | VPS28 | 0.75 |
| 8 | 145680 | 1536995 | CYHR1 | 0.71 |
| 8 | 145742 | 1537057 | RECQL4 | 0.51 |
| 8 | 145748 | 1537063 | LRRC14 | 0.69 |
| 8 | 146003 | 1537318 | ZNF34 | 0.72 |
| 8 | 146020 | 1537335 | RPL8 | 0.73 |
| 8 | 146058 | 1537373 | ZNF7 | 0.76 |
| 8 | 146111 | 1537626 | ZNF250 | 0.66 |
| 8 | 146111 | 1537426 | ZNF250 | 0.66 |
| 8 | 146161 | 1537475 | ZNF16 | 0.67 |
| 8 | 146283 | 1537598 | FLJ20989 | 0.68 |
| 9 | 701 | 1538325 | ANKRD15 | 0.49 |
| 9 | 2005 | 1539629 | SMARCA2 | 0.50 |
| 9 | 2794 | 1540418 | KIAA0020 | 0.58 |
| 9 | 4670 | 1542293 | CDC37L1 | 0.61 |
| 9 | 4783 | 1542407 | RCL1 | 0.52 |
| 9 | 5348 | 1542972 | C9orf46 | 0.55 |
| 9 | 6001 | 1543625 | RANBP6 | 0.54 |
| 9 | 6748 | 1544372 | JMJD2C | 0.53 |
| 9 | 13097 | 1550720 | MPDZ | 0.50 |
| 9 | 15454 | 1553078 | PSIP1 | 0.49 |
| 9 | 19039 | 1556663 | RRAGA | 0.46 |
| 9 | 19043 | 1556667 | FAM29A | 0.58 |
| 9 | 21321 | 1558945 | KLHL9 | 0.61 |
| 9 | 21958 | 1559581 | CDKN2A | 0.45 |
| 9 | 32531 | 1570155 | TOPORS | 0.52 |
| 9 | 33912 | 1571536 | UBAP2 | 0.60 |
| 9 | 35047 | 1572670 | VCP | 0.50 |
| 9 | 35064 | 1572668 | FANCG | 0.57 |
| 9 | 25595 | 1573219 | TESK1 | 0.46 |
| 9 | 35722 | 1573346 | CREB3 | 0.50 |
| 9 | 36181 | 1573805 | CLTA | 0.49 |
| 9 | 37419 | 1575042 | GRHPR | 0.52 |
| 9 | 75249 | 1612873 | VPS13A | 0.45 |
| 9 | 90401 | 1628025 | NOLB | 0.49 |
| 9 | 97364 | 1634988 | SEC61B | 0.53 |
| 9 | 96444 | 1636066 | TEX10 | 0.45 |
| 9 | 121079 | 1658703 | RABGAP1 | 0.61 |
| 9 | 122492 | 1660116 | PSMB7 | 0.55 |
| 9 | 123008 | 1660631 | ARPC5L | 0.45 |
| 9 | 123017 | 1660640 | GOLGA1 | 0.48 |
| 9 | 123287 | 1660911 | PPP6C | 0.50 |
| 9 | 123492 | 1661115 | GAPVD1 | 0.56 |
| 9 | 123577 | 1661201 | MAPKAP1 | 0.45 |
| 9 | 126304 | 1663928 | CIZ1 | 0.46 |
| 9 | 127228 | 1664852 | DOLPP1 | 0.46 |
| 9 | 130012 | 1667635 | CSRP8 | 0.45 |
| 10 | 809 | 1674805 | KIAA0217 | 0.65 |
| 10 | 5811 | 1679807 | GDI2 | 0.46 |
| 10 | 11507 | 1685502 | USP6NL | 0.51 |
| 10 | 11768 | 1685784 | ECHDC3 | 0.59 |
| 10 | 11966 | 1685962 | UPF2 | 0.52 |
| 10 | 12176 | 1686171 | SEC61A2 | 0.52 |
| 10 | 12242 | 1686238 | C10orf7 | 0.559 |
| 10 | 12396 | 1686392 | CAMK1D | 0.48 |
| 10 | 13146 | 1687142 | OPTN | 0.54 |
| 10 | 13365 | 1687361 | SEPHS1 | 0.61 |
| 10 | 14884 | 1688880 | HSPA14 | 0.58 |
| 10 | 14954 | 1688950 | DCLRE1C | 0.49 |
| 10 | 15143 | 1689139 | RPP338 | 0.53 |
| 10 | 26991 | 1700986 | TPRT | 0.48 |
| 10 | 30606 | 1704602 | PAPD1 | 0.51 |
| 10 | 32304 | 1706300 | KIF5B | 0.48 |
| 10 | 34404 | 1706400 | PARD3 | 0.48 |
| 10 | 70061 | 1744056 | DDX21 | 0.47 |
| 10 | 70906 | 1744902 | COL13A1 | 0.46 |
| 10 | 71920 | 1745916 | SGPL1 | 0.48 |
| 10 | 74239 | 1748235 | HSGT1 | 0.54 |
| 10 | 74279 | 1748275 | TTC18 | 0.54 |
| 10 | 74337 | 1748333 | KIAA0974 | 0.56 |
| 10 | 74346 | 1748342 | DNAJC9 | 0.51 |
| 10 | 74355 | 1748351 | MRPS16 | 0.61 |
| 10 | 74480 | 1748476 | ANXA7 | 0.50 |
| 10 | 74541 | 1748537 | PPP3CB | 0.49 |
| 10 | 74851 | 1748847 | SEC24C | 0.60 |
| 10 | 74905 | 1748901 | KIAA0913 | 0.61 |
| 10 | 74906 | 1748902 | NDST2 | 0.59 |
| 10 | 74916 | 1748912 | CAMK2G | 0.64 |
| 10 | 75281 | 1749277 | ADK | 0.60 |
| 10 | 76315 | 1750311 | VDAC2 | 0.62 |
| 10 | 80420 | 1754415 | RAI17 | 0.54 |
| 10 | 80452 | 1754448 | PPIF | 0.51 |
| 10 | 81579 | 1755575 | ANXA11 | 0.51 |
| 10 | 81879 | 1755874 | TSPAN14 | 0.61 |
| 10 | 93879 | 1767874 | IDE | 0.47 |
| 10 | 97088 | 1771084 | C10orf61 | 0.44 |
| 10 | 103270 | 1777266 | C10orf76 | 0.44 |
| 10 | 105307 | 1779303 | OBFC1 | 0.51 |
| 10 | 115259 | 1789255 | DCLRE1A | 0.47 |
| 10 | 118705 | 1792700 | SLC18A2 | 0.46 |
| 10 | 123811 | 1797806 | PLEKHA1 | 0.48 |
| 10 | 126065 | 1800061 | KIAA0157 | 0.58 |
| 10 | 127099 | 1801905 | DHX32 | 0.53 |
| 11 | 918 | 1809951 | AP2A2 | 0.48 |
| 11 | 3794 | 1812827 | FRAG1 | 0.54 |
| 11 | 6596 | 1815629 | TAF10 | 0.63 |
| 11 | 10839 | 1819872 | LOC58486 | 0.53 |
| 11 | 11828 | 1820861 | USP47 | 0.57 |
| 11 | 11828 | 1820861 | USP47 | 0.57 |
| 11 | 35649 | 1844682 | TRIM44 | 0.54 |
| 11 | 36260 | 1845293 | COMMD9 | 0.60 |
| 11 | 43345 | 1852378 | TTC17 | 0.68 |
| 11 | 43667 | 1852700 | HSD17B12 | 0.55 |
| 11 | 43844 | 1852877 | DKFZ564C152 | 0.65 |
| 11 | 43885 | 1852918 | DEPC-1 | 0.63 |
| 11 | 44081 | 1853114 | EXT2 | 0.74 |
| 11 | 44545 | 1853578 | TP53I11 | 0.69 |
| 11 | 44552 | 1853585 | CD82 | 0.72 |
| 11 | 62102 | 1871135 | EEF1G | 0.46 |
| 11 | 64627 | 1873660 | ZFPL1 | 0.45 |
| 11 | 64639 | 1873672 | C11orf2 | 0.53 |
| 11 | 64725 | 1873758 | CAPN1 | 0.45 |
| 11 | 64877 | 1873910 | DPF2 | 0.51 |
| 11 | 66600 | 1875633 | RHOD | 0.49 |
| 11 | 66663 | 1875696 | FBXL11 | 0.58 |
| 11 | 66809 | 1875842 | ADRBK1 | 0.58 |
| 11 | 66941 | 1875974 | PPP1CA | 0.69 |
| 11 | 66971 | 1876004 | RPS6KB2 | 0.52 |
| 11 | 66981 | 1876014 | CORO1B | 0.59 |
| 11 | 67007 | 1876040 | FLJ21749 | 0.47 |
| 11 | 67026 | 1876059 | AIP | 0.57 |
| 11 | 67049 | 1876082 | CDK2AP2 | 0.57 |
| 11 | 67150 | 1876183 | NDIFV1 | 0.60 |
| 11 | 67205 | 1876238 | ALDH3B2 | 0.54 |
| 11 | 67573 | 1876606 | NDUFS8 | 0.67 |
| 11 | 67596 | 1876629 | CHKA | 0.48 |
| 11 | 68048 | 1877081 | C11orf23 | 0.52 |
| 11 | 69229 | 1878262 | CCND1 | 0.55 |
| 11 | 69776 | 1878809 | FADD | 0.81 |
| 11 | 69843 | 1878876 | PPFIA1 | 0.80 |
| 11 | 69971 | 1879004 | CTTN | 0.82 |
| 11 | 70042 | 11879075 | SHANK2 | 0.52 |
| 11 | 70872 | 1879905 | DHCR7 | 0.67 |
| 11 | 70891 | 1879924 | NADSYN1 | 0.71 |
| 11 | 71547 | 1770580 | DKFZP564M082 | 0.53 |
| 11 | 71730 | 1880763 | SKD3 | 0.48 |
| 11 | 72122 | 1881155 | CENTD2 | 0.46 |
| 11 | 73310 | 1882343 | E2IG2 | 0.49 |
| 11 | 73450 | 1882483 | DKFZP586P0123 | 0.52 |
| 11 | 73609 | 1882642 | PME-1 | 0.52 |
| 11 | 77054 | 1886087 | CLNS1A | 0.55 |
| 11 | 77104 | 1886137 | HBXAP | 0.67 |
| 11 | 77259 | 1886292 | PTD015 | 0.72 |
| 11 | 77506 | 1886539 | NDUFC2 | 0.49 |
| 11 | 77538 | 1886571 | ALG8 | 0.48 |
| 11 | 93839 | 1902872 | MRE11A | 0.50 |
| 11 | 94488 | 11903521 | SRP46 | 0.46 |
| 11 | 101805 | 1910838 | PORIMIN | 0.45 |
| 11 | 107418 | 1916451 | CUL5 | 0.60 |
| 11 | 108073 | 1817106 | DDX10 | 0.47 |
| 11 | 111011 | 1920044 | SNF1LK2 | 0.48 |
| 11 | 111434 | 1920467 | DLAT | 0.51 |
| 11 | 111489 | 1920522 | FLJ10726 | 0.63 |
| 11 | 111494 | 1920527 | TIMM8B | 0.46 |
| 11 | 111495 | 1920528 | SDHD | 0.53 |
| 11 | 111635 | 1920668 | PTS | 0.52 |
| 11 | 113142 | 1922175 | ZW10 | 0.61 |
| 11 | 113809 | 1922842 | RBM7 | 0.47 |
| 11 | 113848 | 1922881 | DKFZP566E144 | 0.50 |
| 11 | 116244 | 1925277 | APOA1 | 0.46 |
| 11 | 117810 | 1926843 | ATP5L | 0.56 |
| 11 | 117981 | 1927014 | ARCN1 | 0.56 |
| 11 | 116424 | 1927457 | RPS25 | 0.59 |
| 11 | 118505 | 1927538 | DPAGT1 | 0.52 |
| 11 | 119746 | 1928779 | ARHGEF12 | 0.48 |
| 11 | 123132 | 1932165 | ANF202 | 0.47 |
| 11 | 123481 | 1933114 | SPA17 | 0.47 |
| 11 | 124977 | 1934010 | EI24 | 0.61 |
| 11 | 125000 | 1934033 | ITM1 | 0.51 |
| 11 | 125301 | 1934334 | PUS3 | 0.61 |
| 11 | 125670 | 1934703 | SRPR | 0.53 |
| 11 | 125711 | 1934744 | DCPS | 0.45 |
| 11 | 130283 | 1939316 | SNX19 | 0.47 |
| 11 | 133656 | 1942689 | THY28 | 0.59 |
| 12 | 264 | 1943780 | JARID1A | 0.56 |
| 12 | 733 | 1944249 | WNK1 | 0.64 |
| 12 | 2837 | 1946353 | POXM1 | 0.61 |
| 12 | 2870 | 1946386 | TULP3 | 0.67 |
| 12 | 2939 | 1946455 | TEAD4 | 0.59 |
| 12 | 4467 | 1947983 | C12orf4 | 0.56 |
| 12 | 4570 | 1948085 | DYRK4 | 0.52 |
| 12 | 4629 | 1948145 | NDUFA9 | 0.65 |
| 12 | 6536 | 190052 | NOL1 | 0.45 |
| 12 | 6630 | 1950146 | ING4 | 0.45 |
| 12 | 6727 | 1950243 | MLF2 | 0.49 |
| 12 | 6847 | 1950363 | TPI1 | 0.51 |
| 12 | 6945 | 1950461 | PHB2 | 0.52 |
| 12 | 6950 | 1950466 | C2F | 0.47 |
| 12 | 7234 | 1950750 | PEX5 | 0.50 |
| 12 | 14831 | 1958347 | WBP11 | 0.44 |
| 12 | 32723 | 1976239 | DNM1L | 0.46 |
| 12 | 32788 | 1976304 | CGI-04 | 0.51 |
| 12 | 47510 | 1991026 | DDX23 | 0.50 |
| 12 | 47537 | 1991053 | RND1 | 0.45 |
| 12 | 48238 | 1991754 | MCRS1 | 0.49 |
| 12 | 48433 | 1991948 | TEGT | 0.47 |
| 12 | 50676 | 1994192 | ACVR1B | 0.51 |
| 12 | 52122 | 1995638 | DKFZp564J157 | 0.50 |
| 12 | 52161 | 1995677 | MAP3K12 | 0.52 |
| 12 | 52181 | 1995697 | TARPB2 | 0.52 |
| 12 | 54682 | 1998198 | SUOX | 0.48 |
| 12 | 56374 | 1999890 | OS-9 | 0.55 |
| 12 | 56449 | 1999964 | METTL1 | 0.48 |
| 12 | 62460 | 2005976 | TMEM5 | 0.51 |
| 12 | 63395 | 2006911 | GNS | 0.47 |
| 12 | 63558 | 2007074 | KIAA0984 | 0.55 |
| 12 | 63850 | 2007366 | LEMD3 | 0.48 |
| 12 | 65949 | 2009465 | TIP120A | 0.61 |
| 12 | 66338 | 2009854 | DYKR2 | 0.52 |
| 12 | 66975 | 2010491 | MDM1 | 0.59 |
| 12 | 67367 | 2010883 | NUP107 | 0.64 |
| 12 | 67426 | 2010942 | SLC35E3 | 0.57 |
| 12 | 67488 | 2011004 | MDM2 | 0.60 |
| 12 | 67525 | 2011041 | MGC5370 | 0.65 |
| 12 | 68040 | 2011556 | YEATS4 | 0.47 |
| 12 | 68266 | 2011781 | CCT2 | 0.52 |
| 12 | 68958 | 2012474 | CNOT2 | 0.52 |
| 12 | 74178 | 2017694 | HRB2 | 0.53 |
| 12 | 105254 | 2048770 | POLR3B | 0.59 |
| 12 | 106629 | 2050145 | PRDM4 | 0.45 |
| 12 | 107419 | 2050935 | SART3 | 0.47 |
| 12 | 110691 | 2054207 | FLJ39616 | 0.48 |
| 12 | 110663 | 2054379 | C12orf8 | 0.46 |
| 12 | 112036 | 2055551 | FLJ14827 | 0.48 |
| 12 | 118977 | 2062493 | GCN1L1 | 0.53 |
| 12 | 119060 | 2062576 | PXN | 0.52 |
| 13 | 22102 | 2097697 | MIPEP | 0.47 |
| 13 | 28990 | 2104584 | C13orf22 | 0.54 |
| 13 | 30889 | 2106483 | PFAAP5 | 0.45 |
| 13 | 39101 | 2114696 | MRPS31 | 0.51 |
| 13 | 39101 | 2114696 | MRPS31 | 0.51 |
| 13 | 50505 | 2126099 | NEK2 | 0.48 |
| 13 | 71128 | 2146722 | KIAA1008 | 0.51 |
| 13 | 71156 | 2146750 | C13orf24 | 0.54 |
| 13 | 77692 | 2153286 | C13orf10 | 0.48 |
| 13 | 94152 | 2169746 | UGCGL2 | 0.50 |
| 13 | 96304 | 2171899 | RANBP5 | 0.46 |
| 13 | 96802 | 2172397 | STK24 | 0.48 |
| 13 | 100947 | 2176542 | TPP2 | 0.50 |
| 13 | 108992 | 2184586 | FLJ12118 | 0.50 |
| 13 | 109065 | 2184660 | ING1 | 0.46 |
| 13 | 109466 | 2185060 | ARHGEF7 | 0.45 |
| 13 | 111087 | 2106682 | TUBGCP3 | 0.50 |
| 13 | 112187 | 2187781 | TFDP1 | 0.53 |
| 13 | 112918 | 2188513 | CDC16 | 0.64 |
| 13 | 112965 | 2188560 | UPF3A | 0.52 |
| 14 | 18802 | 2207439 | PARP2 | 0.50 |
| 14 | 19844 | 2208481 | CHD8 | 0.56 |
| 14 | 19936 | 2208573 | C14orf92 | 0.52 |
| 14 | 21226 | 2209863 | OXA1L | 0.47 |
| 14 | 29485 | 2218122 | AP4S1 | 0.52 |
| 14 | 33021 | 2221658 | SNX6 | 0.45 |
| 14 | 37726 | 2226364 | CTAGE5 | 0.57 |
| 14 | 43575 | 2232212 | FKBP3 | 0.54 |
| 14 | 48565 | 2237203 | C14orf38 | 0.47 |
| 14 | 48574 | 2237211 | SOS2 | 0.53 |
| 14 | 48703 | 2237341 | C14orf160 | 0.69 |
| 14 | 48769 | 2237406 | ATP5S | 0.60 |
| 14 | 48925 | 2237563 | MAP4K5 | 0.47 |
| 14 | 50446 | 2239084 | C14orf166 | 0.64 |
| 14 | 50771 | 2239408 | PTGER2 | 0.68 |
| 14 | 50771 | 2239408 | PTGER2 | 0.68 |
| 14 | 51099 | 2239736 | ERO1L | 0.50 |
| 14 | 51164 | 2239801 | PSMC6 | 0.63 |
| 14 | 53522 | 2242159 | C14orf32 | 0.48 |
| 14 | 66108 | 2254745 | VT11B | 0.54 |
| 14 | 68224 | 2256861 | SFRS5 | 0.46 |
| 14 | 71605 | 2260242 | PSEN1 | 0.61 |
| 14 | 72344 | 2260981 | ZNF410 | 0.63 |
| 14 | 72407 | 2261044 | COQ6 | 0.48 |
| 14 | 72517 | 2261154 | ALDH6A1 | 0.50 |
| 14 | 72742 | 2261379 | ABCD4 | 0.50 |
| 14 | 73339 | 2261976 | DLSTP | 0.52 |
| 14 | 73539 | 2262178 | NEK9 | 0.53 |
| 14 | 75778 | 2264415 | GSTZ1 | 0.48 |
| 14 | 75883 | 2264520 | C14orf133 | 0.54 |
| 14 | 76129 | 2264767 | ALKBH | 0.46 |
| 14 | 88853 | 2277491 | CALM1 | 0.53 |
| 14 | 91396 | 22280034 | ITPK1 | 0.51 |
| 14 | 92507 | 2281145 | DDX24 | 0.46 |
| 14 | 94000 | 2282638 | C14orf87 | 0.51 |
| 14 | 97854 | 2286492 | C14orf154 | 0.57 |
| 14 | 98838 | 2287476 | MGC4645 | 0.52 |
| 14 | 101389 | 2290026 | CDC42BPB | 0.51 |
| 14 | 102013 | 2290651 | BAG5 | 0.59 |
| 14 | 102369 | 2291006 | C14orf2 | 0.44 |
| 14 | 103207 | 2291845 | AKT1 | 0.46 |
| 14 | 103314 | 2291952 | KIAA02284 | 0.46 |
| 14 | 103830 | 2292467 | PACS2 | 0.53 |
| 15 | 38776 | 2332725 | FLJ10634 | 0.48 |
| 15 | 40167 | 2334116 | VPS39 | 0.49 |
| 15 | 59681 | 2353809 | VPS13C | 0.46 |
| 15 | 62396 | 2356344 | TRIP4 | 0.45 |
| 15 | 62682 | 2356631 | ZNF609 | 0.45 |
| 15 | 63266 | 2357215 | PARP16 | 0.48 |
| 15 | 63455 | 2357403 | DPP8 | 0.48 |
| 15 | 63587 | 2357535 | DKFZP564O1664 | 0.55 |
| 15 | 63878 | 2357826 | RAB11A | 0.57 |
| 15 | 64503 | 2358451 | SNAPC5 | 0.53 |
| 15 | 64507 | 2358456 | RPL4 | 0.55 |
| 15 | 64513 | 2358462 | FLJ10036 | 0.51 |
| 15 | 66062 | 2360011 | PIAS1 | 0.47 |
| 15 | 70482 | 2364431 | ARIH1 | 0.48 |
| 15 | 72617 | 2366565 | CLK3 | 0.48 |
| 15 | 73344 | 2367293 | COMMD4 | 0.47 |
| 15 | 73475 | 2367424 | PTPN9 | 0.48 |
| 15 | 73647 | 2367596 | C15orf12 | 0.48 |
| 15 | 76304 | 2370252 | REC14 | 0.65 |
| 15 | 86732 | 2380681 | MRPL46 | 0.46 |
| 15 | 86740 | 2380689 | MRPS11 | 0.50 |
| 15 | 86740 | 2380689 | MRPS11 | 0.50 |
| 15 | 97991 | 2391940 | MEF2A | 0.58 |
| 15 | 99557 | 2393506 | SNRPA1 | 0.54 |
| 15 | 99557 | SNRPA1 | 0.54 | |
| 15 | 99917 | 2393866 | BLP2 | 0.59 |
| 16 | 37 | 2394242 | POLR3K | 0.48 |
| 16 | 48 | 2394253 | RHBDF1 | 0.56 |
| 16 | 69 | 2394274 | MPG | 0.64 |
| 16 | 387 | 2394592 | NME4 | 0.48 |
| 16 | 392 | 2394597 | DECR2 | 0.61 |
| 16 | 560 | 2394765 | PIGQ | 0.48 |
| 16 | 658 | 2394863 | RHIT2 | 0.58 |
| 16 | 670 | 2394876 | STUB1 | 0.54 |
| 16 | 711 | 2394916 | MGC2494 | 0.57 |
| 16 | 720 | 2394925 | NARFL | 0.47 |
| 16 | 844 | 2395049 | FLJ12681 | 0.51 |
| 16 | 1483 | 2395689 | KIAA0683 | 0.55 |
| 16 | 1500 | 2395706 | KIAA0590 | 0.60 |
| 16 | 1668 | 2395873 | C16orf34 | 0.51 |
| 16 | 1760 | 2395966 | NME3 | 0.49 |
| 16 | 1974 | 2396179 | GFER | 0.50 |
| 16 | 2214 | 2396419 | E4F1 | 0.48 |
| 16 | 2528 | 2396733 | PDPK1 | 0.58 |
| 16 | 2822 | 2397027 | TCEB2 | 0.49 |
| 16 | 3073 | 2397278 | HCFC1R1 | 0.58 |
| 16 | 3179 | 2397384 | LOC440334 | 0.49 |
| 16 | 3334 | 2397539 | ZNF263 | 0.58 |
| 16 | 3432 | 2397638 | ZNF434 | 0.56 |
| 16 | 3452 | 2397657 | ZNF174 | 0.54 |
| 16 | 3508 | 2397714 | FLJ14154 | 0.55 |
| 16 | 3560 | 2397765 | CLUAP1 | 0.53 |
| 16 | 3706 | 2397914 | TRAP1 | 0.54 |
| 16 | 3777 | 2397982 | CREBBP | 0.56 |
| 16 | 3777 | 2397982 | CREBBP | 0.56 |
| 16 | 4015 | 23962220 | ADCY9 | 0.45 |
| 16 | 4391 | 2398596 | Magmas | 0.48 |
| 16 | 30698 | 2424903 | MGC3121 | 0.46 |
| 16 | 30713 | 2424918 | FBS1 | 0.48 |
| 16 | 31081 | 2425286 | STX4A | 0.48 |
| 16 | 31156 | 2425361 | BCKDK | 0.54 |
| 16 | 31165 | 2425370 | MYST1 | 0.47 |
| 16 | 31179 | 2425384 | PRSS8 | 0.45 |
| 16 | 31537 | 2425742 | FLJ13868 | 0.64 |
| 16 | 46475 | 2440680 | BPS35 | 0.49 |
| 16 | 47276 | 2441482 | PHK8 | 0.48 |
| 16 | 48172 | 2442378 | SIAH1 | 0.54 |
| 16 | 48354 | 2442560 | N4BP1 | 0.54 |
| 16 | 53044 | 2447249 | CHD9 | 0.50 |
| 16 | 53247 | 2447452 | RBL2 | 0.48 |
| 16 | 57272 | 2451477 | DOK4 | 0.59 |
| 16 | 57272 | 2451477 | POLR2C | 0.49 |
| 16 | 57547 | 2451752 | KATNB1 | 0.56 |
| 16 | 57811 | 2452016 | FLJ13154 | 0.46 |
| 16 | 57923 | 2452128 | GTL3 | 0.50 |
| 16 | 57967 | 2452172 | CSNK2A2 | 0.52 |
| 16 | 58325 | 2452530 | FLJ21148 | 0.54 |
| 16 | 58330 | 2452535 | CNOT1 | 0.62 |
| 16 | 58516 | 2452722 | GOT2 | 0.46 |
| 16 | 66534 | 2460739 | DNCLI2 | 0.61 |
| 16 | 66742 | 2460947 | CGI-128 | 0.54 |
| 16 | 66840 | 2461045 | CBFB | 0.49 |
| 16 | 66964 | 2461170 | TRADD | 0.51 |
| 16 | 67037 | 2461242 | HSPC171 | 0.50 |
| 16 | 67248 | 2461453 | ATP6V0D1 | 0.45 |
| 16 | 67468 | 2461673 | ACD | 0.51 |
| 16 | 67485 | 2461690 | MGC11335 | 0.45 |
| 16 | 67533 | 2461738 | RANBP10 | 0.56 |
| 16 | 67652 | 22461858 | THAP11 | 0.48 |
| 16 | 67657 | 2461862 | NUTF2 | 0.57 |
| 16 | 67831 | 2462037 | DDX28 | 0.55 |
| 16 | 67896 | 2462101 | NFATC3 | 0.49 |
| 16 | 68077 | 2462282 | SLC7A6 | 0.49 |
| 16 | 69121 | 2463327 | VPS4A | 0.49 |
| 16 | 69572 | 2463778 | WWP2 | 0.47 |
| 16 | 70063 | 2464268 | AARS | 0.52 |
| 16 | 70157 | 2464362 | DDX19L | 0.57 |
| 16 | 70334 | 2464539 | SFB3B3 | 0.54 |
| 16 | 70498 | 2464703 | VAC14 | 0.54 |
| 16 | 71541 | 2465746 | AP1G1 | 0.53 |
| 16 | 71706 | 2465911 | KIAA0174 | 0.59 |
| 16 | 71904 | 2466109 | DHX38 | 0.66 |
| 16 | 74110 | 2468315 | PSMD7 | 0.51 |
| 16 | 74266 | 2468471 | GLG1 | 0.50 |
| 16 | 74435 | 2468640 | RFWD3 | 0.53 |
| 16 | 75107 | 2469312 | CFDP1 | 0.48 |
| 16 | 75441 | 2469646 | KARS | 0.64 |
| 16 | 75461 | 2469666 | TERF2IP | 0.53 |
| 16 | 77005 | 2471210 | MON1B | 0.62 |
| 16 | 80789 | 2474994 | DC13 | 0.54 |
| 16 | 80854 | 2475059 | KIAA0431 | 0.51 |
| 16 | 83621 | 2477827 | HSBP1 | 0.53 |
| 16 | 83712 | 2477918 | MLYCD | 0.47 |
| 16 | 83867 | 2478072 | MBTPS1 | 0.46 |
| 16 | 82991 | 2478196 | TAF1C | 0.446 |
| 16 | 84293 | 2478496 | KIAA1609 | 0.48 |
| 16 | 84462 | 2478667 | C16orf44 | 0.46 |
| 16 | 84513 | 2478718 | USP10 | 0.70 |
| 16 | 84788 | 2478993 | ZDHHC7 | 0.50 |
| 16 | 85594 | 2479799 | NOC4 | 0.56 |
| 16 | 85615 | 2479820 | COX411 | 0.66 |
| 16 | 85346 | 2480551 | FLJ12998 | 0.51 |
| 16 | 87214 | 2481419 | MAP1LC3B | 0.49 |
| 16 | 88620 | 2482825 | APRT | 0.48 |
| 16 | 88668 | 2482873 | HSPC176 | 0.54 |
| 16 | 89095 | 2483300 | ANKRD11 | 0.54 |
| 16 | 89371 | 2483576 | LOC388344 | 0.55 |
| 16 | 89684 | 2483889 | KIAA1049 | 0.54 |
| 16 | 89757 | 2483963 | FLJ20186 | 0.54 |
| 17 | 670 | 2484917 | RNMTL1 | 0.47 |
| 17 | 1761 | 2486008 | PRPF8 | 0.56 |
| 17 | 2140 | 2486387 | DPH2L1 | 0.48 |
| 17 | 2433 | 2486680 | FLJ10534 | 0.48 |
| 17 | 2433 | 2486680 | SRR | 0.58 |
| 17 | 2704 | 2486951 | PAFAH1B1 | 0.52 |
| 17 | 7324 | 2491571 | ACADVL | 0.58 |
| 17 | 7348 | 2491595 | DULLARD | 0.46 |
| 17 | 7417 | 2491664 | GPS2 | 0.46 |
| 17 | 7494 | 2491741 | PLSCR3 | 0.47 |
| 17 | 16049 | 2500296 | ADORA2B | 0.48 |
| 17 | 16103 | TTC19 | 0.46 | |
| 17 | 17269 | 2501516 | M-RIP | 0.52 |
| 17 | 18349 | 2502596 | FLII | 0.54 |
| 17 | 18962 | 2503209 | PRPSAP2 | 0.45 |
| 17 | 19303 | 2503550 | EPN2 | 0.49 |
| 17 | 19444 | 2503691 | MAPK7 | 0.55 |
| 17 | 21192 | 2505439 | DKFZp566O084 | 0.48 |
| 17 | 21263 | 2505510 | C17orf35 | 0.46 |
| 17 | 21357 | 2505604 | MAP2K3 | 0.45 |
| 17 | 28046 | 2512293 | GIT1 | 0.52 |
| 17 | 28852 | 2513099 | CPD | 0.49 |
| 17 | 28950 | 2513197 | GOSR1 | 0.60 |
| 17 | 30336 | 2514583 | HCA66 | 0.52 |
| 17 | 30410 | 2514657 | LOC440423 | 0.59 |
| 17 | 30615 | 2514862 | RHOT1 | 0.47 |
| 17 | 30804 | 2515051 | MNJMU-R1 | 0.61 |
| 17 | 30917 | 2515164 | PSMD11 | 0.47 |
| 17 | 30960 | 2515207 | CDK5R1 | 0.65 |
| 17 | 30960 | 2515207 | CDK5R1 | 0.65 |
| 17 | 32743 | 2516990 | CCL7 | 0.61 |
| 17 | 33400 | 2517648 | CCT6B | 0.47 |
| 17 | 33453 | 2517700 | LIG3 | 0.63 |
| 17 | 33573 | 2517820 | RAD51L3 | 0.71 |
| 17 | 33604 | 2517851 | FLJ10458 | 0.67 |
| 17 | 38168 | 2522415 | STARD3 | 0.86 |
| 17 | 28197 | 2522444 | TCAP | 0.55 |
| 17 | 38199 | 2522447 | PNMT | 0.54 |
| 17 | 38202 | 2522449 | PERLD1 | 0.88 |
| 17 | 38231 | 2522478 | ERBB2 | 0.86 |
| 17 | 38269 | 2522516 | GRB7 | 0.84 |
| 17 | 38448 | 2522695 | GSDML | 0.66 |
| 17 | 38512 | 2522759 | PSMD3 | 0.73 |
| 17 | 38550 | 2522797 | THRAP4 | 0.77 |
| 17 | 38550 | 2522797 | THRAP4 | 0.77 |
| 17 | 38672 | 2522919 | CASC3 | 0.58 |
| 17 | 38792 | 25223039 | WIRE | 0.57 |
| 17 | 39158 | 2523405 | SMARCE1 | 0.57 |
| 17 | 39158 | 2523405 | SMARCE1 | 0.57 |
| 17 | 39348 | 2523595 | KRT10 | 0.70 |
| 17 | 41087 | 2525334 | COASY | 0.49 |
| 17 | 41092 | 2525339 | MLX | 0.53 |
| 17 | 41225 | 2525473 | EZH1 | 0.50 |
| 17 | 41359 | 2525606 | PSME3 | 0.51 |
| 17 | 41476 | 2525723 | MGC2744 | 0.49 |
| 17 | 41551 | 2525798 | RND2 | 0.44 |
| 17 | 41696 | 2525943 | MBR1 | 0.48 |
| 17 | 42036 | 2526284 | DHX4 | 0.48 |
| 17 | 43614 | 2527861 | NMT1 | 0.57 |
| 17 | 43990 | 2528237 | PLEKHM1 | 0.52 |
| 17 | 44067 | 2528315 | LOC9884 | 0.49 |
| 17 | 46494 | 2530471 | PNPO | 0.44 |
| 17 | 47445 | 2531692 | ATP5G1 | 0.60 |
| 17 | 47461 | 2531706 | FLJ13855 | 0.69 |
| 17 | 47482 | 2531729 | EAP30 | 0.78 |
| 17 | 47847 | 2532094 | ZNF652 | 0.50 |
| 17 | 47956 | 2532203 | PHB | 0.64 |
| 17 | 48152 | 2532399 | SPCP | 0.55 |
| 17 | 48253 | 2532500 | SLC35B1 | 0.79 |
| 17 | 48341 | 2532588 | MYST2 | 0.78 |
| 17 | 48525 | 2532772 | DLX4 | 0.67 |
| 17 | 48808 | 2532855 | ITGA3 | 0.58 |
| 17 | 48647 | 2532894 | PDK2 | 0.49 |
| 17 | 48896 | 2533145 | XYLT2 | 0.74 |
| 17 | 48933 | 2533180 | PRO1855 | 0.50 |
| 17 | 48978 | 2533225 | FLJ20920 | 0.45 |
| 17 | 49031 | 2533278 | RSAD1 | 0.63 |
| 17 | 49031 | 2533332 | EPN3 | 0.55 |
| 17 | 49099 | 2533346 | SSP411 | 0.57 |
| 17 | 49247 | 2533494 | MGC15396 | 0.46 |
| 17 | 49272 | 2533519 | CROP | 0.68 |
| 17 | 49414 | 2533661 | TOB1 | 0.54 |
| 17 | 49518 | 2533765 | SPAG9 | 0.59 |
| 17 | 49706 | 2533953 | NME1 | 0.59 |
| 17 | 49718 | 2533966 | NME2 | 0.72 |
| 17 | 55386 | 2539633 | DGKE | 0.65 |
| 17 | 55490 | 2539737 | COIL | 0.86 |
| 17 | 55637 | 2539884 | AKAP1 | 0.69 |
| 17 | 56757 | 2541055 | FLJ20345 | 0.48 |
| 17 | 56897 | 2541144 | SUPT4H1 | 0.58 |
| 17 | 56906 | 2541153 | FLJ20315 | 0.64 |
| 17 | 57042 | 2541289 | MTMR4 | 0.47 |
| 17 | 57109 | 2541356 | TEX14 | 0.49 |
| 17 | 57245 | 2541492 | RAD51C | 0.77 |
| 17 | 57550 | 2541797 | TRIM37 | 0.66 |
| 17 | 57762 | 2542009 | FLJ10587 | 0.73 |
| 17 | 58117 | 2542364 | DHX40 | 0.71 |
| 17 | 58172 | 2542419 | CLTC | 0.70 |
| 17 | 58249 | 2542496 | BIT1 | 0.78 |
| 17 | 58249 | 2542496 | BIT1 | 0.78 |
| 17 | 58259 | 2542507 | VMP1 | 0.52 |
| 17 | 58412 | 2542659 | TUBD1 | 0.65 |
| 17 | 58445 | 2542692 | RPS6KB1 | 0.69 |
| 17 | 58445 | 2542692 | RPS6KB1 | 0.69 |
| 17 | 58504 | 2542751 | LOC51136 | 0.52 |
| 17 | 58595 | 2542842 | ABC1 | 0.79 |
| 17 | 58731 | 2542978 | USP32 | 0.70 |
| 17 | 58995 | 2543242 | APPBP2 | 0.78 |
| 17 | 59152 | 2543399 | PPM1D | 0.59 |
| 17 | 59230 | 2543477 | BCAS3 | 0.61 |
| 17 | 60234 | 2544482 | BCAS3 | 0.61 |
| 17 | 60234 | 2544482 | BRIP1 | 0.50 |
| 17 | 60497 | 2544745 | THRAP1 | 0.70 |
| 17 | 61030 | 2542577 | TLK2 | 0.77 |
| 17 | 61940 | 2546187 | DKFZP564D166 | 0.59 |
| 17 | 61984 | 2546231 | CYB561 | 0.61 |
| 17 | 62142 | 2546389 | HAN11 | 0.49 |
| 17 | 62254 | 2546501 | LYK5 | 0.56 |
| 17 | 62343 | 2546590 | DDX42 | 0.52 |
| 17 | 62370 | 2546617 | FTSJ3 | 0.52 |
| 17 | 62383 | 2546630 | SMARCD2 | 0.48 |
| 17 | 65578 | 2549826 | CACNG4 | 0.64 |
| 17 | 65624 | 2549871 | HELZ | 0.63 |
| 17 | 53884 | 2550131 | PSMD12 | 0.55 |
| 17 | 65924 | 2550171 | PITPNC1 | 0.50 |
| 17 | 66264 | 2550511 | DKFZP586L0724 | 0.51 |
| 17 | 71763 | 2556010 | SSTR2 | 0.65 |
| 17 | 71877 | 2556124 | CDC42EP4 | 0.52 |
| 17 | 73033 | 2557280 | GPRC5C | 0.48 |
| 17 | 73364 | 2557611 | EBSP | 0.63 |
| 17 | 73370 | 2557617 | FLJ20255 | 0.62 |
| 17 | 73456 | 2557703 | FDXR | 0.45 |
| 17 | 73581 | 2557828 | HUMPPA | 0.65 |
| 17 | 73606 | 2557853 | ICT1 | 0.73 |
| 17 | 73632 | 2557879 | ATP5H | 0.59 |
| 17 | 73640 | 2557888 | KCTD2 | 0.66 |
| 17 | 73681 | 2557928 | SLC16A5 | 0.59 |
| 17 | 73703 | 2557950 | ARMC7 | 0.64 |
| 17 | 73729 | 2557976 | HN1 | 0.50 |
| 17 | 73761 | 2558008 | SUMO2 | 0.59 |
| 17 | 73799 | 2558046 | PCNT1 | 0.57 |
| 17 | 73830 | 2558077 | GGA3 | 0.64 |
| 17 | 73855 | 2558102 | MRPS7 | 0.59 |
| 17 | 73911 | 2558158 | GRB2 | 0.60 |
| 17 | 74050 | 2558297 | KIAA0195 | 0.66 |
| 17 | 74093 | 2558341 | CASKIN2 | 0.66 |
| 17 | 744093 | 2558341 | CASKIN2 | 0.66 |
| 17 | 74119 | 2558366 | LLGL2 | 0.54 |
| 17 | 74220 | 2558467 | RECQL5 | 0.64 |
| 17 | 74261 | 2558508 | HCNGP | 0.56 |
| 17 | 74439 | 2558686 | WBP2 | 0.49 |
| 17 | 74600 | 2558847 | EVPL | 0.57 |
| 17 | 74677 | 2558924 | EXOC7 | 0.59 |
| 17 | 74983 | 2559230 | E2-230K | 0.71 |
| 17 | 75064 | 2559311 | RHBDL6 | 0.47 |
| 17 | 75913 | 2560160 | 9-Sep | 0.58 |
| 17 | 76706 | 2560953 | EVER1 | 0.54 |
| 17 | 76762 | 2561009 | SYNGR2 | 0.51 |
| 17 | 76807 | 2561055 | BIRC5 | 0.48 |
| 17 | 76972 | 2561219 | PGS1 | 0.66 |
| 17 | 77267 | 2561514 | PSCD1 | 0.49 |
| 17 | 79709 | 2563956 | BAIAP2 | 0.49 |
| 17 | 79864 | 2564111 | AZI1 | 0.44 |
| 17 | 81095 | 2565343 | NARF | 0.49 |
| 17 | 81156 | 2565404 | FOXK2 | 0.50 |
| 17 | 81251 | 2565498 | WDR45L | 0.55 |
| 17 | 81294 | 2565541 | RAB40B | 0.56 |
| 17 | 81353 | 2565601 | FM3KRP | 0.53 |
| 18 | 149 | 2566256 | USP14 | 0.48 |
| 18 | 205 | 22566312 | THOC1 | 0.52 |
| 18 | 712 | 2566819 | YES1 | 0.57 |
| 18 | 2528 | 2568636 | METTL4 | 0.57 |
| 18 | 2562 | 2568669 | KNTC2 | 0.45 |
| 18 | 2793 | 2568900 | SMCHD1 | 0.57 |
| 18 | 3252 | 2569360 | MRLC2 | 0.52 |
| 18 | 9093 | 2575200 | NDUFV2 | 0.51 |
| 18 | 9172 | 2575280 | ANKRD12 | 0.57 |
| 18 | 9466 | 2575573 | RALBP1 | 0.64 |
| 18 | 9537 | 2575644 | PP4R1 | 0.53 |
| 18 | 10516 | 2576623 | NAPG | 0.47 |
| 18 | 11841 | 2577949 | CHMP1B | 0.62 |
| 18 | 11874 | 2577981 | MPPE1 | 0.57 |
| 18 | 11971 | 2578079 | IMPA2 | 0.60 |
| 18 | 12298 | 2578406 | TUBB6 | 0.51 |
| 18 | 12319 | 2578426 | AFG3L2 | 0.73 |
| 18 | 12422 | 2578529 | C18ord43 | 0.45 |
| 18 | 12663 | 2578770 | C18orf9 | 0.55 |
| 18 | 12693 | 2578800 | TNFSG5IP1 | 0.63 |
| 18 | 12783 | 2578891 | PTPN1 | 0.57 |
| 18 | 12938 | 2579045 | SEH1L | 0.69 |
| 18 | 13717 | 2579824 | RNMT | 0.68 |
| 18 | 19335 | 2585443 | C18orf8 | 0.51 |
| 18 | 19363 | 2585471 | NPC1 | 0.52 |
| 18 | 20259 | 2586366 | IMPACT | 0.47 |
| 18 | 27662 | 2593770 | KIAA1012 | 0.53 |
| 18 | 31122 | 2597230 | ZNF271 | 0.45 |
| 18 | 32626 | 2598735 | C18orf10 | 0.54 |
| 18 | 37787 | 2603895 | PIK3C3 | 0.48 |
| 18 | 43620 | 2609727 | SMAD2 | 0.59 |
| 18 | 45267 | 2611374 | RPL17 | 0.46 |
| 18 | 46047 | 2612155 | MBD1 | 0.58 |
| 18 | 46061 | 2612168 | CXXC1 | 0.55 |
| 18 | 57860 | 2623968 | PIGN | 0.50 |
| 18 | 58391 | 2624498 | ZCCHC2 | 0.51 |
| 18 | 585333 | 2624640 | PHLPP | 0.57 |
| 18 | 59147 | 2625254 | FVT1 | 0.76 |
| 18 | 59205 | 2625313 | VPS48 | 0.49 |
| 18 | 75761 | 2641869 | PQLC1 | 0.63 |
| 18 | 75832 | 2641939 | TXNL4A | 0.63 |
| 18 | 75893 | 2642001 | C18orf22 | 0.60 |
| 18 | 75966 | 2642074 | KIAA0863 | 0.49 |
| 19 | 12673 | 2654896 | TNPO2 | 0.46 |
| 19 | 15325 | 2657548 | AKAP8 | 0.57 |
| 19 | 15394 | 2657616 | WIZ | 0.52 |
| 19 | 17309 | 2659352 | GTPBP3 | 0.59 |
| 19 | 17483 | 2659706 | PGLS | 0.50 |
| 19 | 18804 | 2661026 | RENT1 | 0.48 |
| 19 | 18891 | 2861114 | HOMER3 | 0.54 |
| 19 | 18892 | 2661114 | DDX49 | 0.57 |
| 19 | 19091 | 2661314 | FLJ20422 | 0.54 |
| 19 | 19317 | 2661540 | KIAA0892 | 0.47 |
| 19 | 34390 | 2676613 | UQCRFS1 | 0.54 |
| 19 | 34789 | 2677012 | POP4 | 0.67 |
| 19 | 34848 | 2677070 | PLENKF1 | 0.55 |
| 19 | 34995 | 2677217 | CCNE1 | 0.67 |
| 19 | 35125 | 2677348 | C19orf2 | 0.73 |
| 19 | 40812 | 2683034 | MGC10433 | 0.46 |
| 19 | 42815 | 2685038 | KIAA0961 | 0.48 |
| 19 | 43802 | 2666024 | EIF2S12 | 0.57 |
| 19 | 43830 | 2686053 | ACTN4 | 0.47 |
| 19 | 48792 | 2691015 | ANF576 | 0.45 |
| 19 | 50575 | 2692797 | PPP1R13L | 0.46 |
| 19 | 50605 | 2692827 | ERCC1 | 0.54 |
| 19 | 54309 | 2696532 | LIN7B | 0.49 |
| 19 | 54641 | 2696864 | FLJ20643 | 0.78 |
| 19 | 54683 | 2696905 | RPL13A | 0.49 |
| 19 | 54708 | 2696931 | FCGRT | 0.52 |
| 19 | 54751 | 2696973 | NOSIP | 0.71 |
| 19 | 54778 | 2697001 | PRRG2 | 0.53 |
| 19 | 54855 | 2697077 | IRF3 | 0.54 |
| 19 | 55013 | 2697236 | MED25 | 0.45 |
| 19 | 55046 | 2697269 | PTOV1 | 0.47 |
| 19 | 55056 | 2697279 | PNKP | 0.51 |
| 19 | 55073 | 26972295 | TBC1D17 | 0.44 |
| 19 | 55102 | 2697324 | NUP62 | 0.57 |
| 19 | 55172 | 2697394 | VRK3 | 0.56 |
| 19 | 55221 | 2697444 | ZNF473 | 0.52 |
| 19 | 60433 | 2702655 | KIAA1115 | 0.51 |
| 19 | 60465 | 2702668 | HSPBP1 | 0.49 |
| 19 | 60656 | 2702879 | ISOC2 | 0.54 |
| 19 | 60845 | 2703067 | ZNF580 | 0.45 |
| 19 | 62554 | 2704777 | ZNF304 | 0.50 |
| 19 | 622691 | 2704913 | ZNF419 | 0.61 |
| 19 | 622817 | 2705040 | ZNF134 | 0.50 |
| 19 | 62885 | 2705108 | ZNF551 | 0.52 |
| 19 | 63386 | 2705609 | ZNF274 | 0.44 |
| 19 | 63482 | 2705705 | ZNF8 | 0.47 |
| 19 | 63661 | 2705883 | FLJ45850 | 0.49 |
| 19 | 63670 | 2705893 | ZNF324 | 0.65 |
| 19 | 63748 | 2705970 | TRIM28 | 0.49 |
| 19 | 63759 | 2705981 | UBE2M | 0.44 |
| 20 | 459 | 2706493 | CSNK2A1 | 0.48 |
| 20 | 1418 | 2707452 | NSFL1C | 0.45 |
| 20 | 3185 | 2709219 | ITPA | 0.48 |
| 20 | 20010 | 2726044 | CRNKL1 | 0.444 |
| 20 | 32662 | 2738696 | CDKSRAP1 | 0.50 |
| 20 | 34018 | 2740052 | NCOA6 | 0.73 |
| 20 | 34232 | 2740266 | GSS | 0.69 |
| 20 | 34306 | 2740340 | TRPC4AP | 0.73 |
| 20 | 34419 | 2740453 | C2orf31 | 0.49 |
| 20 | 34530 | 2740564 | LOC400843 | 0.65 |
| 20 | 34582 | 2740616 | ITGB4BP | 0.67 |
| 20 | 34606 | 2740640 | C20orf44 | 0.59 |
| 20 | 34759 | 2740793 | CEP2 | 0.72 |
| 20 | 34919 | 2740953 | SPAG4 | 0.48 |
| 20 | 34929 | 2740964 | CPNE1 | 0.66 |
| 20 | 34998 | 2741032 | NFS1 | 0.71 |
| 20 | 35007 | 2741041 | PRNC2 | 0.60 |
| 20 | 35105 | 2741139 | PHF20 | 0.68 |
| 20 | 35257 | 2741291 | SCAND1 | 0.73 |
| 20 | 35458 | 2741492 | EPB41L1 | 0.68 |
| 20 | 35540 | 2741574 | C20orf4 | 0.79 |
| 20 | 35681 | 2741715 | DLGAP4 | 0.67 |
| 20 | 35920 | 2741954 | C20orf24 | 0.54 |
| 20 | 35966 | 2742000 | NDRG3 | 0.68 |
| 20 | 36066 | 2742100 | C20orf172 | 0.48 |
| 20 | 36105 | 2742139 | KIAA0889 | 0.70 |
| 20 | 36493 | 2742527 | RPN2 | 0.67 |
| 20 | 38063 | 2744097 | ACTR5 | 0.68 |
| 20 | 38276 | 2744311 | DHX35 | 0.70 |
| 20 | 40419 | 2746453 | ZHX3 | 0.51 |
| 20 | 40452 | 2746486 | PLCG1 | 0.45 |
| 20 | 43511 | 2749545 | C20orf111 | 0.69 |
| 20 | 43814 | 2749848 | C20orf121 | 0.69 |
| 20 | 43814 | 2749848 | TDE1 | 0.54 |
| 20 | 43846 | 2749880 | PKIG | 0.54 |
| 20 | 44200 | 2750234 | YWHAB | 0.51 |
| 20 | 44256 | 2750290 | TOMM34 | 0.58 |
| 20 | 45156 | 2751190 | PTE1 | 0.52 |
| 20 | 45206 | 2751240 | PPGB | 0.45 |
| 20 | 45228 | 2751262 | SLC12A5 | 0.47 |
| 20 | 46816 | 2752850 | NCOA3 | 0.54 |
| 20 | 48224 | 2754258 | ARGEF2 | 0.65 |
| 20 | 48348 | 2754382 | CSE1L | 0.67 |
| 20 | 48415 | 2754450 | STAU | 0.69 |
| 20 | 48521 | 2754555 | DDX27 | 0.78 |
| 20 | 48935 | 2754969 | B4GALT5 | 0.48 |
| 20 | 49148 | 2755183 | SLC9A8 | 0.73 |
| 20 | 49205 | 2755240 | SPATA2 | 0.77 |
| 20 | 49238 | 2755273 | ZNF313 | 0.46 |
| 20 | 49383 | 2755417 | UBE2V1 | 0.76 |
| 20 | 49812 | 2755846 | PTPN1 | 0.49 |
| 20 | 50020 | 2756054 | PARD6B | 0.52 |
| 20 | 50237 | 2756271 | DPM1 | 0.49 |
| 20 | 50261 | 2756295 | MOCS3 | 0.56 |
| 20 | 50899 | 2756933 | ATP9A | 0.52 |
| 20 | 51453 | 2757487 | ZFP64 | 0.53 |
| 20 | 52869 | 2758903 | ZNF217 | 0.50 |
| 20 | 53510 | 2759544 | PFDN4 | 0.71 |
| 20 | 55653 | 2761687 | CSTF1 | 0.56 |
| 20 | 55729 | 2761763 | C20orf43 | 0.67 |
| 20 | 55890 | 2761924 | TFAP2C | 0.51 |
| 20 | 56612 | 2762646 | RAE1 | 0.76 |
| 20 | 56619 | 2762654 | RNPC1 | 0.45 |
| 20 | 56822 | 2762856 | PCK1 | 0.58 |
| 20 | 57627 | 2763662 | RAB22A | 0.72 |
| 20 | 57650 | 2763684 | VAPB | 0.75 |
| 20 | 57912 | 2753947 | STX16 | 0.82 |
| 20 | 57953 | 2763987 | NPEPL1 | 0.69 |
| 20 | 63054 | 2769098 | ARFRP1 | 0.60 |
| 20 | 63093 | 2769127 | ZGPAT | 0.58 |
| 20 | 63098 | 2769132 | SLC2A4RG | 0.50 |
| 20 | 63223 | 2769257 | TPD52L2 | 0.57 |
| 20 | 63223 | 2769257 | TPD52L2 | 0.57 |
| 20 | 63298 | 2769332 | UCKL1 | 0.53 |
| 20 | 63339 | 2769373 | C20orf14 | 0.50 |
| 20 | 63431 | 2769465 | TGS19 | 0.45 |
| 21 | 26030 | 2795806 | GABPA | 0.48 |
| 21 | 33836 | 2803612 | SON | 0.46 |
| 21 | 36665 | 2806441 | ZCWCC3 | 0.48 |
| 21 | 36679 | 2806455 | CHAF1B | 0.50 |
| 21 | 44383 | 2814160 | PWP2H | 0.51 |
| 21 | 44410 | 2814186 | C21orf33 | 0.44 |
| 21 | 45045 | 2814821 | UBE2G2 | 0.52 |
| 21 | 45082 | 2814858 | SUMO3 | 0.49 |
| 21 | 45126 | 2814902 | PTTG1IP | 0.47 |
| 21 | 46600 | 2816376 | PCNT2 | 0.56 |
| 21 | 46912 | 2816688 | HRMT1L1 | 0.53 |
| 22 | 15993 | 2832745 | CECR5 | 0.48 |
| 22 | 16546 | 2833298 | BCL2L13 | 0.48 |
| 22 | 16546 | 2833298 | BCL2L13 | 0.48 |
| 22 | 16645 | 2833397 | MICAL3 | 0.47 |
| 22 | 16935 | 2833687 | PEX26 | 0.50 |
| 22 | 17496 | 2834248 | DGCR14 | 0.50 |
| 22 | 17693 | 2834445 | HIRA | 0.45 |
| 22 | 17813 | 2834565 | UFD1L | 0.54 |
| 22 | 18304 | 2835056 | COMT | 0.55 |
| 23 | 18480 | 2835232 | RANBP1 | 0.58 |
| 22 | 19120 | 2835873 | KELCHL | 0.47 |
| 22 | 19538 | 2836290 | SNAP29 | 0.45 |
| 22 | 26492 | 2842344 | MN1 | 0.70 |
| 22 | 27408 | 2844160 | CHEK2 | 0.52 |
| 22 | 28048 | 2844800 | AP1B1 | 0.48 |
| 22 | 28226 | 2844979 | C22ord19 | 0.66 |
| 22 | 28275 | 2845027 | NIPSNAP1 | 0.48 |
| 22 | 28488 | 2845240 | UCRC | 0.47 |
| 22 | 2927 | 2846049 | PES1 | 0.64 |
| 22 | 29566 | 2846318 | ZCWCC1 | 0.49 |
| 22 | 26692 | 2846444 | FLJ20618 | 0.51 |
| 22 | 29969 | 2846721 | LIMK2 | 0.61 |
| 22 | 30120 | 2846872 | DRG1 | 0.68 |
| 22 | 30475 | 2847228 | DEPDC5 | 0.46 |
| 22 | 31108 | 2847860 | HSPC117 | 0.56 |
| 22 | 31195 | 2847947 | FBXO7 | 0.54 |
| 22 | 35087 | 2851839 | FLJ23322 | 0.50 |
| 22 | 35106 | 2851858 | TXN2 | 0.45 |
| 22 | 35150 | 2851902 | EIF3S7 | 0.54 |
| 22 | 36200 | 2852952 | CDC42EP1 | 0.50 |
| 22 | 36488 | 2853241 | EIF3S6IP | 0.53 |
| 22 | 36488 | 2853241 | EIF3S6IP | 0.53 |
| 22 | 36551 | 2853304 | MICAL-1 | 0.52 |
| 22 | 36593 | 2853345 | POLR2F | 0.47 |
| 22 | 37267 | 2854019 | GTPBP1 | 0.557 |
| 22 | 37325 | 2854077 | KIAA0063 | 0.52 |
| 22 | 37621 | 2854374 | APOBEC3B | 0.49 |
| 22 | 38003 | 2854755 | SYNGR1 | 0.52 |
| 22 | 38141 | 2854894 | FLJ20232 | 0.55 |
| 22 | 38962 | 2855714 | TNRC6B | 0.45 |
| 22 | 338966 | 2855738 | ADSL | 0.49 |
| 22 | 29464 | 2856216 | ST13 | 0.53 |
| 22 | 39590 | 2856343 | RBX1 | 0.45 |
| 22 | 40108 | 2856860 | ACO2 | 0.46 |
| 22 | 40136 | 2856888 | D15Wsu75e | 0.60 |
| 22 | 40260 | 2857013 | G22P1 | 0.56 |
| 22 | 40313 | 2857065 | NHP2L1 | 0.61 |
| 22 | 40472 | 2857224 | SREBF2 | 0.51 |
| 22 | 40725 | 2857477 | NDUFA6 | 0.46 |
| 22 | 40767 | 2857519 | CYP2D6 | 0.51 |
| 22 | 40787 | 2857539 | TCF20 | 0.53 |
| 22 | 41166 | 2857918 | DIA1 | 0.60 |
| 22 | 41497 | 2858249 | PACSIN2 | 0.47 |
| 22 | 41778 | 2858531 | BZRP | 0.49 |
| 22 | 42610 | 2859362 | CGI-51 | 0.49 |
| 22 | 43860 | 2860612 | NUP50 | 0.65 |
| 22 | 45293 | 2862045 | CERK | 0.48 |
| 22 | 48386 | 2865138 | BRD1 | 0.56 |
| 22 | 48467 | 2865219 | ZBED4 | 0.58 |
| 22 | 48532 | 2865284 | MGC11256 | 0.63 |
| 22 | 48806 | 2865559 | PP2447 | 0.52 |
| 22 | 48895 | 2865648 | PLXNB2 | 0.52 |
| 22 | 49002 | 2866754 | KIAA0685 | 0.58 |
| 22 | 49018 | 2865770 | SBF1 | 0.55 |
| 22 | 49071 | 2865823 | ARSA | 0.56 |
| 22 | 49074 | 2865826 | BC002942 | 0.54 |
| 22 | 49079 | 2865831 | 384D8-2 | 0.55 |
| 22 | 49094 | 2865847 | SCO2 | 0.59 |
| 22 | 49097 | 2865849 | ECGF1 | 0.47 |
| 22 | 49099 | 2865851 | LOC440836 | 0.49 |
| X | 43779 | 2909928 | UTX | 0.50 |
| X | 71910 | 2938059 | XIST | 0.67 |
| XY | 114 | 3019955 | GTPBP6 | 0.50 |
| XY | 1150 | 3020992 | SLC25A6 | 0.46 |
| XY | 1168 | 3021009 | ASMTL | 0.49 |
| XY | 2000 | 3021841 | ZBED1 | 0.45 |

TABLE 8
si RNA sequences for selected 11q13 amplicon genes

| | siRNA duplex no. | |
|---|---|---|
| Gene | sense/antisense | sequence |
| CCND1 | 1--sense | ACAACUUCCUGUCCUACUAUU (SEQ ID NO: 142) |
| CCND1 | 1--antisense | 5′-PUAGUAGGACAGGAAGUUGUUU (SEQ ID NO: 143) |
| CCND1 | 2--sense | GUUCGUGGCCUCUAAGAUGUU (SEQ ID NO: 144) |
| CCND1 | 2--antisense | 5′-PCAUCUUAGAGGCCACGAACUU (SEQ ID NO: 145) |
| CCND1 | 3--sense | GCAUGUAGUCACUUUAUAAUU (SEQ ID NO: 146) |
| CCND1 | 3--antisense | 5′-PUUAUAAAGUGACUACAUGCUU (SEQ ID NO: 147) |
| CCND1 | 4--sense | GCGUGUAGCUAUGGAAGUUUU (SEQ ID NO: 148) |
| CCND1 | 4--antisense | 5′-PAACUUCCAUAGCUACACGCUU (SEQ ID NO: 149) |
| FGF3 | 1--sense | GAGCUGGGCUAUAAUACGUUU (SEQ ID NO: 150) |
| FGF3 | 1--antisense | 5′-PACGUAUUAUAGCCCAGCUCUU (SEQ ID NO: 151) |
| FGF3 | 2--sense | GGCGGUACCUGGCCAUGAAUU (SEQ ID NO: 152) |
| FGF3 | 2--antisense | 5′-PUUCAUGGCCAGGUACCGCCUU (SEQ ID NO: 153) |
| FGF3 | 3--sense | GCGCCGAGAGACUGUGGUAUU (SEQ ID NO: 154) |
| FGF3 | 3--antisense | 5′-PUACCACAGUCUCUCGGCGCUU (SEQ ID NO: 155) |
| FGF3 | 4--sense | AGAAGCAGAGCCCGGAUAAUU (SEQ ID NO: 156) |
| FGF3 | 4--antisense | 5′-PUUAUCCGGGCUCUGCUUCUUU (SEQ ID NO: 157) |
| PPFIA1 | 1--sense | GAAGAAAGGUUACGACAGAUU (SEQ ID NO: 158) |
| PPFIA1 | 1--antisense | 5′-PUCUGUCGUAACCUUUCUUCUU (SEQ ID NO: 159) |
| PPFIA1 | 2--sense | GAGUAGCACUUGAAAGAUGUU (SEQ ID NO: 160) |
| PPFIA1 | 2--antisense | 5′-PCAUCUUUCAAGUGCUACUCUU (SEQ ID NO: 161) |
| PPFIA1 | 3--sense | AGACAACCAUAAAGUGUGAUU (SEQ ID NO: 162) |
| PPFIA1 | 3--antisense | 5′-PUCACACUUUAUGGUUGUCUUU (SEQ ID NO: 163) |
| PPFIA1 | 4--sense | AAAGGACAUUCGUGGCUUAUU (SEQ ID NO: 164) |
| PPFIA1 | 4--antisense | 5′-PUAAGCCACGAAUGUCCUUUUU (SEQ ID NO: 165) |
| FOLR3 | 1--sense | GGACGGACCUGCUCAAUGUUU (SEQ ID NO: 166) |
| FOLR3 | 1--antisense | 5′-PACAUUGAGCAGGUCCGUCCUU (SEQ ID NO: 167) |
| FOLR3 | 2--sense | GAAUUGGACCUCAGGGAUUUU (SEQ ID NO: 168) |
| FOLR3 | 2--antisense | 5′-PAAUCCCUGAGGUCCAAUUCUU (SEQ ID NO: 169) |
| FOLR3 | 3--sense | UAACUGGGAUCACUGUGGUUU (SEQ ID NO: 170) |
| FOLR3 | 3--antisense | 5′-PACCACAGUGAUCCCAGUUAUU (SEQ ID NO: 171) |
| FOLR3 | 4--sense | UCUCGUGGGAUUAUUGAUUUU (SEQ ID NO: 172) |
| FOLR3 | 4--antisense | 5′-PAAUCAAUAAUCCCACGAGAUU (SEQ ID NO: 173) |
| NEU3 | 1--sense | ACUGGAUAAUAGUGCGUAUUU (SEQ ID NO: 174) |
| NEU3 | 1--antisense | 5′-PAUACGCACUAUUAUCCAGUUU (SEQ ID NO: 175) |
| NEU3 | 2--sense | GCAGAGAAGCGUUCCACGAUU (SEQ ID NO: 176) |
| NEU3 | 2--antisense | 5′-PUCGUGGAACGCUUCUCUGCUU (SEQ ID NO: 177) |
| NEU3 | 3--sense | GAGCUGAGUUGGCGAGGGUUU (SEQ ID NO: 178) |
| NEU3 | 3--antisense | 5′-PACCCUCGCCAACUCAGCUCUU (SEQ ID NO: 179) |
| NEU3 | 4--sense | CUCAUUAGGCCCAUGGUUAUU (SEQ ID NO: 180) |
| NEU3 | 4--antisense | 5′-PUAACCAUGGGCCUAAUGAGUU (SEQ ID NO: 181) |

TABLE 9
Sequence of shRNAs targeting human NEU3, FGF3 and PPFIA1 genes

| | | |
|---|---|---|
| gene | shRNA clone | Sequence |

| | | |
|---|---|---|
| NEU3 | Hairpin sequence for TRCN0000005149 | CCGGAGTGACAACATGCTCCTTCAACTCGAGTTGAAGGAGCATGTTGTCACTTTTTT |
| | | (SEQ ID NO: 182) |
| NEU3 | Hairpin sequence for TRCN0000005148 | CCGGCCGAGCTACAGACCAATATAACTCGAGTTATATTGGTCTGTAGCTCGGTTTTT |
| | | (SEQ ID NO: 183) |
| NEU3 | Hairpin sequence for TRCN0000005147 | CCGGCCCTGCGTATACCTACTACATCTCGAGATGTAGTAGGTATACGCAGGGTTTTT |
| | | (SEQ ID NO: 184) |
| NEU3 | Hairpin sequence for TRCN0000005146 | CCGGCCTACCTTCTACAGCCTTGTACTCGAGTACAAGGCTGTAGAAGGTAGGTTTTT |
| | | (SEQ ID NO: 185) |
| NEU3 | Hairpin sequence for TRCN0000010926 | CCGGGCAGAAGAGTGGTTGTGTGTTCTCGAGAACACACAACCACTCTTCTGCTTTTT |
| | | (SEQ ID NO: 186) |
| FGF3 | Hairpin sequence for TRCN0000038162 | CCGGCAAGCTCTACTGCGCCACGAACTCGAGTTCGTGGCGCAGTAGAGCTTGTTTTTG |
| | | (SEQ ID NO: 187) |
| FGF3 | Hairpin sequence for TRCN0000038159 | CCGGACTCTATGCTTCGGAGCACTACTCGAGTAGTGCTCCGAAGCATAGAGTTTTTTG |
| | | (SEQ ID NO: 188) |
| FGF3 | Hairpin sequence for TRCN0000038161 | CCGGCGGCAGAAGCAGAGCCCGGATCTCGAGATCCGGGCTCTGCTTCTGCCGTTTTTG |
| | | (SEQ ID NO: 189) |
| FGF3 | Hairpin sequence for TRCN0000038160 | CCGGGAGCTGGGCTATAATACGTATCTCGAGATACGTATTATAGCCCAGCTCTTTTTG |
| | | (SEQ ID NO: 190) |
| FGF3 | Hairpin sequence for V2LHS_43059 | TGCTGTTGACAGTGAGCGCCCACGAGCTGGGCTATAATACTAGTGAAGCCACAGATGTA |
| | (mir-30) | GTATTATAGCCCAGCTCGTGGATGCCTACTGCCTCGGA (SEQ ID NO: 191) |
| PPFIA1 | Hairpin sequence for TRCN0000002969 | CCGGGAGGAGATTGAAAGTCGAGTTCTCGAGAACTCGACTTTCAATCTCCTCTTTTT |
| | | (SEQ ID NO: 192) |
| PPFIA1 | Hairpin sequence for TRCN0000002967 | CCGGGTAGTTTGTTAGAAGAGGAATCTCGAGATTCCTCTTCTAACAAACTACTTTTT |
| | | (SEQ ID NO: 193) |
| PPFIA1 | Hairpin sequence for TRCN0000002968 | CCGGGCTCCAAGAAATCATAAGTAACTCGAGTTACTTATGATTTCTTGGAGCTTTTT |
| | | (SEQ ID NO: 194) |
| PPFIA1 | Hairpin sequence for TRCN0000002971 | CCGGGCACAGTTGGAGGAGAAGAATCTCGAGATTCTTCTCCTCCAACTGTGCTTTTT |
| | | (SEQ ID NO: 195) |
| PPFIA1 | Hairpin sequence for TRCN0000002970 | CCGGGCATATTAACAAGCCAGCAAACTCGAGTTTGCTGGCTTGTTAATATGCTTTTT |
| | | (SEQ ID NO: 196) |
| PPFIA1 | Hairpin sequence for V2LHS_27777 | TGCTGTTGACAGTGAGCGCCCTTGAAAGGGAAGAAGAAATTAGTGAAGCCACAGATGTA |
| | (mir-30) | ATTTCTTCTTCCCTTTCAAGGATGCCTACTGCCTCGGA (SEQ ID NO: 197) |

The linker sequences connecting the sense and anti-sense sequences are bolded.

TABLE 10
Target si RNA sequences for selected
20q13 amplicon genes

| | | |
|---|---|---|
| | siRNA | |
| Gene | no. | Target sequence |

| | | |
|---|---|---|
| BCAS1 | 1 | UAUCAGGGCAGUCCGAUGA (SEQ ID NO: 198) |
| BCAS1 | 2 | GAAGUAGAAUCAGCCUUAC (SEQ ID NO: 199) |
| BCAS1 | 3 | GAUAAGUGCUGUUGCGGAU (SEQ ID NO: 200) |
| BCAS1 | 4 | CCAAUAAAGCUCCAGCGAA (SEQ ID NO: 201) |
| CSTF1 | 1 | GGAAAUAUCAACGGGACGA (SEQ ID NO: 202) |
| CSTF1 | 2 | GGAUGGUGUUUCAAAUCGA (SEQ ID NO: 203) |
| CSTF1 | 3 | CGAAUGAUUAGUAUCGAUU (SEQ ID NO: 204) |
| CSTF1 | 4 | GUAUGCAAUUGGUCGUUCA (SEQ ID NO: 205) |
| PCK1 | 1 | CCCAAGAUCUUCCAUGUCA (SEQ ID NO: 206) |
| PCK1 | 2 | CCAUGUACGUCAUCCCAUU (SEQ ID NO: 207) |
| PCK1 | 3 | GAAGUGCUUUGCUCUCAGG (SEQ ID NO: 208) |
| PCK1 | 4 | GGUGGAAGGUUGAGUGCGU (SEQ ID NO: 209) |
| TMEPAI | 1 | GAAAGGACACCCUCUCUAG (SEQ ID NO: 210) |
| TMEPAI | 2 | GCACUUGUAAAGAUGAUUA (SEQ ID NO: 211) |
| TMEPAI | 3 | UCACUUAAGAGGCCAAUAA (SEQ ID NO: 212) |
| TMEPAI | 4 | GCGCAGAAUUCUUCACCUU (SEQ ID NO: 213) |
| RAB22A | 1 | GGACUACGCCGACUCUAUU (SEQ ID NO: 214) |
| RAB22A | 2 | GAAGAAUUCCAUCCACUGA (SEQ ID NO: 215) |
| RAB22A | 3 | GAAACAACCUCUGCGAAUU (SEQ ID NO: 216) |
| RAB22A | 4 | GCAGUUUGAUUAUCCGAUU (SEQ ID NO: 217) |
| VAPB | 1 | UGUUACAGCCUUUCGAUUA (SEQ ID NO: 218) |
| VAPB | 2 | CCACGUAGGUACUGUGUGA (SEQ ID NO: 219) |
| VAPB | 3 | GCUCUUGGCUCUGGUGGUU (SEQ ID NO: 220) |
| VAPB | 4 | GUAAUUAUUGGGAAGAUUG (SEQ ID NO: 221) |
| STX16 | 1 | GUAUGAUGUUGGCCGGAUU (SEQ ID NO: 222) |
| STX16 | 2 | AAAUAUUCCACCAGCGAUU (SEQ ID NO: 223) |
| STX16 | 3 | GCUAAUUGAGAGAGCGUUA (SEQ ID NO: 224) |
| STX16 | 4 | AGUAGGACUUCAUCGUUUA (SEQ ID NO: 225) |
| GNAS | 1 | GCAAGUGGAUCCAGUGCUU (SEQ ID NO: 226) |
| GNAS | 2 | GCAUGCACCUUCGUCAGUA (SEQ ID NO: 227) |
| GNAS | 3 | AUGAGGAUCCUGCAUGUUA (SEQ ID NO: 228) |
| GNAS | 4 | CAACCAAAGUGCAGGACAU (SEQ ID NO: 229) |

The application's sequence listing, which the Patent Office published only in electronic form, follows.

SEQUENCE LISTING (229 sequences)

SEQ ID NO: 1 - DNA, 10692 bp, Homo sapiens
  acetyl-Coenzyme A carboxylase alpha (ACACA), transcript variant 2
ggcccccgccgggtgctgagcgcccgccaccgccctcttggccttttcccggtccccgccgcgcgcctgctgctgtccccgtgcccgaggactgggaggatggggctgagccgcttgcctgacttttgatccgaccagtaatcactttgcccgtgtggcgcgtggcccgttgcctgaggcttcctggcgcgtggggctgtttggtcccctccggagtgcggtgaggcgggccgagccgggactgcctgggtttggggataacgttcccatctccacccctgttgcagcaagggaaattgaggctgagggaactgggcccagggacggcgagccgtggctgcctctccagtccgggccccgaagggctgctcgtggatgaaccagactgattttaaggggtgaagagggtgcgtttcaatcagatgcttctggaacgtcgaaattgtcttctttggaaagaaccatcccctctttgggcttcagaggcccaaattgaggcgcaatgatgagaggatgtggtggtctactctgatgtcaatcttgagggctagggtcttgctatgtcacccagcctggagtggaattgtgtgatcaagactcactgaagcctccaactcctgggctcaagcaatcctcccacctcagccacccaagtagctgggactacaggctggagtgcaatggcatgatcttggctcactgcaacctccgcctcccggattcaacggattctcctgcctcagcctcctgagtagctgggattataggtgcctgccacaacacccaggaccagacttatgaagtggccttcctgaggagattttctgaccttatggtatgaagttccttcaggctcttaattctggataaactggagtgattaacaagagcaaagagacatagtattcagataaggactttgtgtcttatttttcttttatatcacaactggagccacagttgtgggcaaggcactgactttcttgatgaattctgtccatctgtaaagcagctatatatcccactggaggctttgcctctcagagacaacgtgaagacggataagcaggcatcaggagcagagtggcctctcagctggtcagattctccgaagaaggatcctctaggctgggcacggtggctcacacctataatcccagcactttgggaggccgaggcaggtggatcacgaggtcaggagttcgaggccagcctggccaatatggtctttctggaagtggatatctactcagacagtaagaattataagagctgtaagagctcattttggaggaataatggatgaaccatctcccttggcccaacctctggagctgaaccagcactctcgattcataataggttctgtgtctgaagataactcagaggatgagatcagcaacctggtgaagttggacctactggaggagaaggagggctccttgtcacctgcttctgttggctcagatacactctctgatttggggatctctagcctacaggatggcttggccttgcacataaggtccagcatgtctggcttgcacctagtaaagcagggccgagacagaaagaaaatagattctcaacgagatttcactgtggcttctccagcagaatttgttactcgctttgggggaaataaagtgattgagaaggttcttattgctaacaatggcattgcagcagtgaaatgcatgcggtctatccgtaggtggtcttatgaaatgtttcgaaatgaacgtgcaattagattcgttgtcatggtcacacctgaagaccttaaagccaatgcagaatacattaagatggcagatcactatgtgccagtgcctggaggaccaaacaacaacaactatgcaaatgtggaattaattcttgatattgctaaaaggatcccagtacaagcagtgtgggctggctggggtcatgcttctgagaatcccaaactaccggaacttctcttgaaaaatggcattgccttcatgggtcctccaagccaggccatgtgggctttaggggataagattgcatcttccatagtggctcaaactgcaggtatcccaactcttccctggagcggcagtggtcttcgtgtggactggcaggaaaatgatttttcaaaacgtatcttaaatgttccccaggagctatatgaaaaaggttatgtgaaagatgtggatgatgggctacaggcagctgaggaagttggatatccagtaatgatcaaggcctcagagggaggaggagggaagggaattagaaaagtcaacaatgcagatgacttccctaatctcttcagacaggttcaagctgaagttcctggatctcccatatttgtgatgagactagccaaacaatctcgtcatctggaggtgcagatcttagcggaccaatatggcaatgctatctctttgtttggtcgtgattgctctgtacaacgcaggcatcagaagattattgaagaagcacctgctactattgctactccagcagtatttgaacacatggaacagtgtgcggtgaaacttgccaaaatggtgggttatgtgagtgctgggactgtggaatacctgtacagccaggatggcagcttctactttctggaattgaatcctcggctgcaggtagagcacccttgtacagagatggtggctgatgtcaatctccctgcagcacagctccagattgccatggggattcctctatatagaatcaaggatatccgtatgatgtatggggtatctccctggggtgattctcccattgattttgaagattctgcacacgttccttgtccaaggggccatgttattgctgctcggatcactagtgaaaatccagatgagggttttaagcccagctcaggaacagttcaggagctaaatttccgcagcaataagaatgtttggggatatttcagtgttgctgctgcagggggacttcatgaatttgctgattctcagtttggtcactgcttttcttggggagaaaacagagaagaggcaatttcaaacatggtggtggctttgaaggagctgtctattcggggtgactttcgaactacagttgaatacctgatcaaattgttagagactgaaagctttcagatgaacagaattgatactggctggctggacagactgatagcagaaaaagtacaggctgagcgacctgacaccatgttgggggttgtgtgtggtgccctccacgtggcagatgtgagcctgcggaatagcgtctctaacttccttcactccttagaaaggggtcaagtccttcctgctcatacacttctgaatacagtagatgttgaacttatctatgagggagtcaagtatgtacttaaggtgactcgacagtcccccaactcctatgtggtgatcatgaatggctcatgtgtagaagtagatgtacatcggctgagtgacggtggactgctcttgtcctatgatggcagcagttatactacgtatatgaaagaggaagtggatagatatcgcatcacaattggcaataaaacctgtgtgtttgagaaggaaaatgacccatcggtgatgcgctcaccttctgctgggaagttaatccagtacattgtagaagatggaggtcatgtgtttgccggccagtgctatgctgagattgaggtaatgaagatggtaatgaccttaacagctgtggagtctggctgtatccattacgtcaagcgacctggagcagctcttgaccctggctgtgtactagccaaaatgcaactggacaaccccagcaaggttcagcaggctgaacttcacacaggtagtctgccacggatccagagcacggcactcagaggcgagaaactccatcgagtgttccattatgtcctggataatctggtcaatgtaatgaatggatactgccttccagatcctttctttagcagcaaggtaaaagactgggtagagcgattgatgaaaaccctcagagatccctccctgcctctcctagaattgcaagatattatgaccagtgtgtctggccgcattccccccaatgtggagaagtctatcaagaaggaaatggctcagtatgctagcaacatcacatcagtcctctgtcagtttcccagccagcagattgcaaacatcctagatagccatgcagctacattgaaccggaaatctgaacgggaagtcttctttatgaatactcagagcattgttcagctggtacagaggtaccgaagtggcatccgaggccacatgaaggctgtggtgatggatctgctccggcagtacctgcgagtagagacacaattccagaatggtcactatgacaaatgtgtattcgccctccgagaagagaataaaagtgacatgaacactgtactgaactacatcttctctcacgctcaagtcaccaagaagaatcttctggtcacaatgcttattgatcagttgtgtggccgggaccctactctcactgatgagctgctgaatattctcacagagctaactcaactcagtaagaccaccaatgccaaagtagcacttcgagcacgccaggttcttattgcctcccatttgccatcatatgagcttcgccataaccaagtagagtctatcttcctatcagctattgacatgtatggacatcaattttgcattgagaacctgcagaaactcatcctatcagaaacatctatttttgatgtcctaccaaacttcttctatcacagcaaccaagtagtgaggatggcagctctggaggtgtatgttcgaagggcttatattgcctatgaacttaacagcgtacaacaccgccagcttaaggacaacacctgtgtggtggaattccagttcatgctgcccacatctcatccaaacagagggaacatccctacgctaaacagaatgtccttctcctccaacctcaaccactatggcatgacccatgtagctagtgtcagcgatgtactgttggacaactcattcactccaccttgtcagcggatgggcggaatggtctcttttcggacttttgaagattttgtcaggatctttgatgaagtgatgggctgcttctctgactccccaccccagagtcccacattccctgaggcaggtcacacgtctctttatgatgaggataaggttcccagggatgaaccaattcacattctcaatgtggctatcaagactgactgtgatattgaggatgacaggctggcagctatgttcagagaatttacccagcaaaataaagctaccctggttgaccatgggatccggcgccttactttcctggttgcacaaaaggatttcagaaagcaggtcaactatgaggtggatcggagatttcatagagaattccctaaattttttacattccgagcaagggataagtttgaggaggatcgtatctatcgtcatctggagcctgctctggctttccagttagagctgaaccggatgagaaattttgacctcactgccattccatgtgctaatcacaagatgcacctgtatctcggggcagccaaggtggaagtgggcacagaagtgacagactacaggttctttgttcgtgcaatcatcaggcattctgatctggtcaccaaggaagcttcttttgaatatctgcaaaatgaaggggagcggctactcctggaagccatggatgagttggaagttgcttttaacaatacaaatgtccgcactgactgtaaccacatcttcctcaactttgtgcccacggttatcatggacccatcaaagattgaggaatccgtgcggagcatggtaatgcggtatggaagtcgcctgtggaaattgcgcgtcctccaggcagaactgaaaatcaacattcgcctgacgccaactggaaaagcaattcccatccgcctcttcctgacaaacgagtctggctattacttggatatcagcctatacaaggaagtgactgactccaggacagcacagatcatgtttcaggcatatggagacaaacagggaccactgcatggaatgttaatcaatactccatatgtgaccaaagacctgctgcaatcaaagaggttccaggcacaatccttagggacaacatacatatatgatatcccagagatgtttcggcagtccctgatcaaactctgggagtctatgtccactcaagcatttcttccatctccccctctgccttctgacatgctgacttacactgaactggtactggatgatcaaggtcagctggtccacatgaacaggcttccaggaggaaatgagattggcatggtagcttggaaaatgacctttaaaagtcctgaatatccagaaggccgagatatcattgttattggcaatgacatcacataccgaattgggtcctttgggcctcaagaggatttgttatttctcagagcttccgaacttgctagggcagaaggtattccacgcatctatgtatcagccaacagtggagcaagaatcggactggcagaagaaattcgccatatgtttcatgtggcctgggtagatcctgaggatccttacaagggatacaggtatttatatctgactcctcaagattataagagagtcagtgctctcaactctgtccattgtgaacacgtggaagatgaaggagaatccaggtacaagataacagatattattgggaaagaagagggaattggacccgagaaccttcgaggttctggaatgattgctggagaatcctcattggcctataatgagatcattaccatcagcctggtgacgtgccgggccattgggattggggcttaccttgtccggctgggacagagaaccatccaggttgagaattctcacttaattctaacaggagctggagccctcaacaaagtcctcgggcgggaagtgtacacctccaataaccagctggggggcatccagattatgcacaacaatggggtgacccactgcactgtgtgtgatgactttgaaggggttttcactgtcctgcactggctgtcttacatgcccaagagcgtgcacagttcagttcctcttctgaactcaaaggatcctatagacagaatcatcgagtttgttcccacaaagaccccatacgatcctcgatggatgctagcaggccgtcctcacccaacccaaaaaggtcagtggttgagtggcttttttgactatggatctttctcagagattatgcagccctgggcacagactgtggtggttggtagagccaggctaggaggaatacctgtgggagttgttgctgtagaaacccgaacagtagaactaagtatcccagctgatccagcaaacctggattctgaagccaagataatccagcaggctggccaggtttggttcccagattctgcgtttaagacgtatcaggccatcaaggacttcaaccgggaagggctgcctctgatggtctttgccaactggagaggcttctctggtggaatgaaagatatgtacgaccaagtgctgaagtttggtgcttacattgtggatggcttgagggagtgctgccagcctgtgctggtttacattcctccccaggctgagctgcggggtggctcctgggtggtgattgactcctccatcaacccccggcacatggagatgtatgctgaccgagaaagcaggggatctgttctggagccagaagggacagtagaaatcaaattccgcagaaaggatctggtgaaaaccatgcgtcgggtggacccagtctacatccacttggctgagcgattggggaccccagagctaagcacagctgagcggaaggagttggagaacaagttgaaggagcgggaggaattcctaattcccatttaccatcaggtagccgtgcagtttgctgacttgcacgacacaccaggccggatgcaggagaagggtgttattagcgatatcctggattggaaaacatcccgtaccttcttctactggcggctgaggcgtcttctgctggaggacctggtcaagaagaaaatccacaatgccaaccctgagctgactgatggccagattcaagccatgttaaggcgctggtttgtggaagtggaaggaacagtgaaggcttatgtttgggacaataataaggatctggcggagtggctagagaaacagctgacagaggaggatggtgttcactcggtaatagaggaaaacatcaaatgcatcagcagagactacgtcctcaagcaaatccgcagcttggtccaggccaatccagaggttgccatggattccatcatccatatgacgcagcacatatcacccactcagcgagcagaagtcatacggatcctctccacaatggattccccttccacgtaggaagagcttcctgcctgtccctgccctgtctctggagaaaagggctagagctgccttttacaactgtaaccactgtaatgagaaggcacaggagacccagcactggagtcaaatggcattttacttcctctcgtttcaggttatgcatgacatcctgggatgtaagatcacagaatccccctccagcccaccagtcacacctaccccattcagtatttattaccctggccaggcctagtcctccactccctgcacaggactgagaaggcaatgaaaggtacaaacatgtaccatgaggtcttactaaccaaagtagggctgcccctcctgtcctgacagccccttggcctcccagcatggggaagcgtgaggagttgcccagcagtgagcagcccccctcactcctggccccatgagccgcagccacaggcagcagaggagggctaaggagaggaggaagcctcaagtccattgtttattaccccgactcttagcccagcacacagtaggcactggagaggaatgattcccagtttaaccacactacggtaccttttatgaagaaaaattagagcataaaatctactacaagctccataggaactcaaagatgagggcaaaactgtgagccaagaagcagagaaagaaaatagaaccagttattcttgatttaggggacctcaaccttgggttcagtctctgaggacaaagggaaaggtagttgttggcctgcctctcgcctgcacgtcactgctggactagctgtcgcatgtggctgggagctgcaaggccagtgcttgaggggccccagcagttccacaggtggtgaagcctgagttggcagaggaggagccagaagagaactgccctttctgcactggtggaaactagttatttatgccatgtggagagccagtgagatagatagatagtctgtttgttttgaggacttggaaagttgttcctatgaagcctggagcttggatggttttgagaggttaatggtgcctccacactcactcttccctagttccaggattactgtcctagcagctaacggttctactctcttccccagagtgtagacaggcagcaggtctccccacagctctgaaaggaccctggtgacagctacaccctcagcaccaggagctggccttcctgatgagggaggcttccaggaaacacagaatccacatgaccttaagattatttacaactcagtcatggtgctgctgtcctccaggcttactggcccctcctgactggcatcaggggcttcctcaggtggtggagagagtttactttcaacaactagtttattcaagaaaagaacttactgattcctctgttcctaaagcaagagtggcaggtgatcagggctggtgtagcatccggttcctttagtgcagctaactgcatttgtcactgatgaccaaggaggaaatcactaagacatttgagaagcagtggtatgaacgttcttggacaagccacagttctgagccttaaccctgtagtttgcacacaagaacgagctccacctccccttcttcaggaggaatctgtgcggatagattggctggacttttcaatggttctgggttgcaggtgggcactgtatggctgggtatggagcggacagcccccaggagtcagagcctcagcccggctgccctggtggaaggtacaggtgttcagcaccttcagaaaagggcataaagtggtgggggacaattctcagtccaggaaaatgcattgaccattgctggctatttgcttacctagtaagaattggattcatttttgaccagattattcttctatgcttttttgcaataaatcaaatcccacatatctacaagtggtatgaagtcctgcaccccccaggaggcctgtccaggcatgtcttcagaggcagggtgggttacactcatttacctcccctctccccaccaaattatgacacaaacgagtatgtttcctctctagaaccctgtaatgcctcctcccccatccccagagctccttactgtaggtcttaccctggacaaggattttttcaagttggaggcacagaacatgagcaatctgacattcccacagcccctcaaacatgcaaggctactaaggcaggaggagtataaatgatggatattgaccaagacctgcttggacggagaccgccatattatctgttctcttcgttcacaaaacagccttcacttgtctcagaatttgatggacacatactgtgatgagcaggagcttcagatgcactctttacacattttgttgaaataaacctctacatttgtagaagaaaaaaaaaaaaaaaaaaaaaaaaaaaaaa

SEQ ID NO: 2 - protein, 2346 aa, Homo sapiens
  acetyl-Coenzyme A carboxylase alpha (ACACA), isoform 2
MDEPSPLAQPLELNQHSRFIIGSVSEDNSEDEISNLVKLDLLEEKEGSLSPASVGSDTLSDLGISSLQDGLALHIRSSMSGLHLVKQGRDRKKIDSQRDFTVASPAEFVTRFGGNKVIEKVLIANNGIAAVKCMRSIRRWSYEMFRNERAIRFVVMVTPEDLKANAEYIKMADHYVPVPGGPNNNNYANVELILDIAKRIPVQAVWAGWGHASENPKLPELLLKNGIAFMGPPSQAMWALGDKIASSIVAQTAGIPTLPWSGSGLRVDWQENDFSKRILNVPQELYEKGYVKDVDDGLQAAEEVGYPVMIKASEGGGGKGIRKVNNADDFPNLFRQVQAEVPGSPIFVMRLAKQSRHLEVQILADQYGNAISLFGRDCSVQRRHQKIIEEAPATIATPAVFEHMEQCAVKLAKMVGYVSAGTVEYLYSQDGSFYFLELNPRLQVEHPCTEMVADVNLPAAQLQIAMGIPLYRIKDIRMMYGVSPWGDSPIDFEDSAHVPCPRGHVIAARITSENPDEGFKPSSGTVQELNFRSNKNVWGYFSVAAAGGLHEFADSQFGHCFSWGENREEAISNMVVALKELSIRGDFRTTVEYLIKLLETESFQMNRIDTGWLDRLIAEKVQAERPDTMLGVVCGALHVADVSLRNSVSNFLHSLERGQVLPAHTLLNTVDVELIYEGVKYVLKVTRQSPNSYVVIMNGSCVEVDVHRLSDGGLLLSYDGSSYTTYMKEEVDRYRITIGNKTCVFEKENDPSVMRSPSAGKLIQYIVEDGGHVFAGQCYAEIEVMKMVMTLTAVESGCIHYVKRPGAALDPGCVLAKMQLDNPSKVQQAELHTGSLPRIQSTALRGEKLHRVFHYVLDNLVNVMNGYCLPDPFFSSKVKDWVERLMKTLRDPSLPLLELQDIMTSVSGRIPPNVEKSIKKEMAQYASNITSVLCQFPSQQIANILDSHAATLNRKSEREVFFMNTQSIVQLVQRYRSGIRGHMKAVVMDLLRQYLRVETQFQNGHYDKCVFALREENKSDMNTVLNYIFSHAQVTKKNLLVTMLIDQLCGRDPTLTDELLNILTELTQLSKTTNAKVALRARQVLIASHLPSYELRHNQVESIFLSAIDMYGHQFCIENLQKLILSETSIFDVLPNFFYHSNQVVRMAALEVYVRRAYIAYELNSVQHRQLKDNTCVVEFQFMLPTSHPNRGNIPTLNRMSFSSNLNHYGMTHVASVSDVLLDNSFTPPCQRMGGMVSFRTFEDFVRIFDEVMGCFSDSPPQSPTFPEAGHTSLYDEDKVPRDEPIHILNVAIKTDCDIEDDRLAAMFREFTQQNKATLVDHGIRRLTFLVAQKDFRKQVNYEVDRRFHREFPKFFTFRARDKFEEDRIYRHLEPALAFQLELNRMRNFDLTAIPCANHKMHLYLGAAKVEVGTEVTDYRFFVRAIIRHSDLVTKEASFEYLQNEGERLLLEAMDELEVAFNNTNVRTDCNHIFLNFVPTVIMDPSKIEESVRSMVMRYGSRLWKLRVLQAELKINIRLTPTGKAIPIRLFLTNESGYYLDISLYKEVTDSRTAQIMFQAYGDKQGPLHGMLINTPYVTKDLLQSKRFQAQSLGTTYIYDIPEMFRQSLIKLWESMSTQAFLPSPPLPSDMLTYTELVLDDQGQLVHMNRLPGGNEIGMVAWKMTFKSPEYPEGRDIIVIGNDITYRIGSFGPQEDLLFLRASELARAEGIPRIYVSANSGARIGLAEEIRHMFHVAWVDPEDPYKGYRYLYLTPQDYKRVSALNSVHCEHVEDEGESRYKITDIIGKEEGIGPENLRGSGMIAGESSLAYNEIITISLVTCRAIGIGAYLVRLGQRTIQVENSHLILTGAGALNKVLGREVYTSNNQLGGIQIMHNNGVTHCTVCDDFEGVFTVLHWLSYMPKSVHSSVPLLNSKDPIDRIIEFVPTKTPYDPRWMLAGRPHPTQKGQWLSGFFDYGSFSEIMQPWAQTVVVGRARLGGIPVGVVAVETRTVELSIPADPANLDSEAKIIQQAGQVWFPDSAFKTYQAIKDFNREGLPLMVFANWRGFSGGMKDMYDQVLKFGAYIVDGLRECCQPVLVYIPPQAELRGGSWVVIDSSINPRHMEMYADRESRGSVLEPEGTVEIKFRRKDLVKTMRRVDPVYIHLAERLGTPELSTAERKELENKLKEREEFLIPIYHQVAVQFADLHDTPGRMQEKGVISDILDWKTSRTFFYWRLRRLLLEDLVKKKIHNANPELTDGQIQAMLRRWFVEVEGTVKAYVWDNNKDLAEWLEKQLTEEDGVHSVIEENIKCISRDYVLKQIRSLVQANPEVAMDSIIHMTQHISPTQRAEVIRILSTMDSPST

SEQ ID NO: 3 - DNA, 2403 bp, Homo sapiens
  disintegrin/metalloproteinase domain 9 short protein precursor (ADAM9)
gagtgctgagaggaacctgcggaatcggccgagatggggtctggcgcgcgctttccctcggggacccttcgtgtccggtggttgctgttgcttggcctggtgggcccagtcctcggtgcggcgcggccaggctttcaacagacctcacatctttcttcttatgaaattataactccttggagattaactagagaaagaagagaagcccctaggccctattcaaaacaagtatcttatgttattcaggctgaaggaaaagagcatattattcacttggaaaggaacaaagaccttttgcctgaagattttgtggtttatacttacaacaaggaagggactttaatcactgaccatcccaatatacagaatcattgtcattatcggggctatgtggagggagttcataattcatccattgctcttagcgactgttttggactcagaggattgctgcatttagagaatgcgagttatgggattgaacccctgcagaacagctctcattttgagcacatcatttatcgaatggatgatgtctacaaagagcctctgaaatgtggagtttccaacaaggatatagagaaagaaactgcaaaggatgaagaggaagagcctcccagcatgactcagctacttcgaagaagaagagctgtcttgccacagacccggtatgtggagctgttcattgtcgtagacaaggaaaggtatgacatgatgggaagaaatcagactgctgtgagagaagagatgattctcctggcaaactacttggatagtatgtatattatgttaaatattcgaattgtgctagttggactggagatttggaccaatggaaacctgatcaacatagttgggggtgctggtgatgtgctggggaacttcgtgcagtggcgggaaaagtttcttatcacacgtcggagacatgacagtgcacagctagttctaaagaaaggttttggtggaactgcaggaatggcatttgtgggaacagtgtgttcaaggagccacgcaggcgggattaatgtgtttggacaaatcactgtggagacatttgcttccattgttgctcatgaattgggtcataatcttggaatgaatcacgatgatgggagagattgttcctgtggagcaaagagctgcatcatgaattcaggagcatcgggttccagaaactttagcagttgcagtgcagaggactttgagaagttaactttaaataaaggaggaaactgccttcttaatattccaaagcctgatgaagcctatagtgctccctcctgtggtaataagttggtggacgctggggaagagtgtgactgtggtactccaaaggaatgtgaattggacccttgctgcgaaggaagtacctgtaagcttaaatcatttgctgagtgtgcatatggtgactgttgtaaagactgtcggttccttccaggaggtactttatgccgaggaaaaaccagtgagtgtgatgttccagagtactgcaatggttcttctcagttctgtcagccagatgtttttattcagaatggatatccttgccagaataacaaagcctattgctacaacggcatgtgccagtattatgatgctcaatgtcaagtcatctttggctcaaaagccaaggctgcccccaaagattgtttcattgaagtgaattctaaaggtgacagatttggcaattgtggtttctctggcaatgaatacaagaagtgtgccactgggaatgctttgtgtggaaagcttcagtgtgagaatgtacaagagatacctgtatttggaattgtgcctgctattattcaaacgcctagtcgaggcaccaaatgttggggtgtggatttccagctaggatcagatgttccagatcctgggatggttaacgaaggcacaaaatgtggtgctggaaagatctgtagaaacttccagtgtgtagatgcttctgttctgaattatgactgtgatgttcagaaaaagtgtcatggacatgggaaatgaatactgcattgagggacggacttctggtcttcttcttcctaattgttccccttattgtctgtgctatttttatcttcatcaagagggatcaactgtggagaagctacttcagaaagaagagatcacaaacatatgagtcagatggcaaaaatcaagcaaacccttctagacagccggggagtgttcctcgacatgtttctccagtgacacctcccagagaagttcctatatatgcaaacagatttgcagtaccaacctatgcagccaagcaacctcagcagttcccatcaaggccacctccaccacaaccgaaagtatcatctcagggaaacttaattcctgcccgtcctgctcctgcacctcctttatatagttccctcacttgatttttttaaccttctt

SEQ ID NO: 4 - protein, 655 aa, Homo sapiens
  disintegrin/metalloproteinase domain 9 short protein (ADAM9)
MGSGARFPSGTLRVRWLLLLGLVGPVLGAARPGFQQTSHLSSYEIITPWRLTRERREAPRPYSKQVSYVIQAEGKEHIIHLERNKDLLPEDFVVYTYNKEGTLITDHPNIQNHCHYRGYVEGVHNSSIALSDCFGLRGLLHLENASYGIEPLQNSSHFEHIIYRMDDVYKEPLKCGVSNKDIEKETAKDEEEEPPSMTQLLRRRRAVLPQTRYVELFIVVDKERYDMMGRNQTAVREEMILLANYLDSMYIMLNIRIVLVGLEIWTNGNLINIVGGAGDVLGNFVQWREKFLITRRRHDSAQLVLKKGFGGTAGMAFVGTVCSRSHAGGINVFGQITVETFASIVAHELGHNLGMNHDDGRDCSCGAKSCIMNSGASGSRNFSSCSAEDFEKLTLNKGGNCLLNIPKPDEAYSAPSCGNKLVDAGEECDCGTPKECELDPCCEGSTCKLKSFAECAYGDCCKDCRFLPGGTLCRGKTSECDVPEYCNGSSQFCQPDVFIQNGYPCQNNKAYCYNGMCQYYDAQCQVIFGSKAKAAPKDCFIEVNSKGDRFGNCGFSGNEYKKCATGNALCGKLQCENVQEIPVFGIVPAIIQTPSRGTKCWGVDFQLGSDVPDPGMVNEGTKCGAGKICRNFQCVDASVLNYDCDVQKKCHGHGK

SEQ ID NO: 5 - DNA, 30837 bp, Homo sapiens
  ADAM metallopeptidase domain 9 (meltrin gamma) (ADAM9), transcript variant 1
tgaatttcagataaacaatgaataatttgttagtataaatatgtcccatgcaatatcttgttgaaattaaaaaaaaaaaaaaaagtcttccttccatccccacccctaccactaggcctaaggaatagggtcaggggctccaaatagaatgtggttgagaagtggaattaagcaggctaatagaaggcaaggggcaaagaagaaaccttgaatgcattgggtgctgggtgcctccttaaataagcaagaagggtgcattttgaagaattgagatagaagtctttttgggctgggtgcagttgctcgtggttgtaattccagcactttgggaggctgaggcgggaggatcacctgaggttgggagttcaagaccagcctcaccaacgtggagaaaccctgtctttactaaaaatacaaaaaattagctggtcatggtggcacatgcctgtaatcccagctgctcgggaggctgaggcaggagaatcacttgaaccagggaggcagaggttgtggtgagcagagatcgcgccattgctctccagcctgggcaacaagagcaaaagttcgtttaaaaaaaaaaaaaagtcctttcgatgtgactgtctcctcccaaatttgtagaccctcttaagatcatgcttttcagatacttcaaagattccagaagatatgccccgggggtcctggaagccacaaggtaaacacaacacatccccctccttgactatcaattttactagaggatgtggtgggaaaaccattatttgatattaaaacaaataggcttgggatggagtaggatgcaagctccccaggaaagtttaagataaaacctgagacttaaaagggtgttaagagtggcagcctagggaatttatcccggactccgggggagggggcagagtcaccagcctctgcatttagggattctccgaggaaaagtgtgagaacggctgcaggcaacccaggcgtcccggcgctaggagggacgcacccaggcctgcgcgaagagagggagaaagtgaagctgggagttgccactcccagacttgttggaatgcagttggagggggcgagctgggagcgcgcttgctcccaatcacaggagaaggaggaggtggaggaggagggctgcttgaggaagtataagaatgaagttgtgaagctgagattcccctccattgggaccggagaaaccaggggagccccccgggcagccgcgcgccccttcccacggggccctttactgcgccgcgcgcccggcccccacccctcgcagcaccccgcgccccgcgccctcccagccgggtccagccggagccatggggccggagccgcagtgagcaccatggagctggcggccttgtgccgctgggggctcctcctcgccctcttgccccccggagccgcgagcacccaaggtgggtctggtgtggggaggggacggagcagcggcgggaccctgccctgtggatgccccgccgaggtcccgcggccggcggggccagaggggcccggacgagctctcctatcccgaagttgtggacagtcgagacgctcagggcagccgggccctggggccctcgggcgggagggggcagttacacggcagcggctcgagatggcccatccaagagactggcgctttccaggctccgaggggctccgggaacttgtcaaagaagttctctgaaattgttcagaaagttttcccgcaaagggtgtattgcgtagagcgcgcgcgcgcgtttccccccttcttgagccccctcaagctttctcaaagcctttccagttggcagcctccgcctccggactggcctgggctggattccttgggggggtcctctgccctgcccctcctccagcccctccccgctccccttcagacgattttggtttggttgctcctgcttctggcggggtcgggtgtgtgtgtgtgtggtggagtggagggtggcatagcaacctgtcccaaccagagccggggaggaaagggtggcccggagggtggcctcttgctggggtctgggttgggggcgggggagacgtttgctttgaacagattcttggggccagcttagggactgtgctctgtgacttttggagcgcgtggaccatggaggggtgggggtgggtttcttggggtgtaaagtgggagagttcccagagaaggaagctaagaaataaggccagatgggagcctagggagggctgcgttgttctgctgccttttccttggtgctgtgcgtggggaagggtgagtgggggcagtgtgtatcctgacccatctgtccacctgtgtgcattaatcataaaagctaacatatagcctgggccaggtatactctgccaggaactgtttgtggtgttttgcatgcattctcctttaatcctagaacacccctatagtggaagttctgccagcattctggactgagtagcagtccagaggttgagtagcagctagtaagtggtggggtcaagatgggaccccaggcagtgcgacccccaaccatgcattcgaaatcgctatatggatgagtgcacctggagcaatgagggacactgctccctgagtcactgggctgcaggggagacaaaatgaaagtgttctgggagtcgtgggtggtctccataggtcagagggtctggggagggagtgggtgtcatcgtggctgtgtgttgcccgaggggccctctgtgagtgagtgcatggccgtgttatctctgcaggtctacgccagggtgttcctcagttgtgtggtctttgtatttgtgtgtctgggctttgtgttgccaaacagcagtctctctgctgacttggggacacaggctgaactctgtcctctgcaggaactcccttaaggtgctgggccagatctgccataaacagagggaggtagccttctatggccacgccttcttgctgaggaagaaggttcctctcttccagggagtacatccttgccctccctgtttcccagacaagcatcttcacctctcatcttctgatgagaagggtgaggccatactgagctgtcaggctgagctgctgcccttcctcaccttgggctgggagttgatcagggaatggcagttgctgcagagctggatttgagggctgggttctctggatggggcctcctcatgtcctcacccctcaacctgcactattgattgtgttgtgcaggagttagttaaaaagtcattgcacagcctgggcaacaaggcaaaactctgtacaaaaaatacaaaaattagttggatgtgattacacgtgcctgtagtcccagctactccggaggctgaggcaggaggatcacctgagcccaggaagttgaggcttgcagtgagctgtgattgcaaatgctctccagcctgggtgacagtgtgagactccgtttcagaaaaaaagtataccacccagctgcctccagcacccagattttacccaaggggtgaggtctggggcaggaatgtgggggaaggggaggcctagggggagccccagaggggtcaggatttttctgagatcctttcttagaggtatgggttttacaaattgcagcaaatacatccttttaatcttgcagaactccttcatattttaattccagtatgattcttccaacagcctcctctctttactatacttggggaaagtactcattttatttgtcaagaaaaaaacaattgaaaagatagggatcaaatgtaaaaagaaaaaatacgtggcattccaaagtcaaacacaaagcatgtttaattttctcgtggtttgggattacccatattcctgctgtatgaacctgtcttgtcttaacttttaagaaatgtacggtgtacttcctatatgctaggtttttatccatgctttcatttaatctctgtgacagtcctgtgaagtaggtgcacagatgagaaaatggaagttcagagaaatgaagcaacttatccaaggctcccagctacccagtaatgtccagggaatttttggactctgaagaggaggcattaagaggtggttagagtcttattccagccaacaataatgggttgaacaaagccttaggggcaggcaggtggccagatgggaggagaagcgctcctcttgttcaggcgaatgacctttccatccacttctctaggctgtagaaagtggagctgagctgggggccctgaggttccctcttgacttcagagtcctctcccttcctgtccagccaatgcctgtcttccttttgggccctaccagcatgacagggggctgcgggcaggaggggacagaggccacgttgacacacagggctgtgggtgagagagacagctgaagtgtcagcgtgaggggccagtgtggggctgcggctgggagggctggggtggggcccagggtagttgtgcctgtccttgggtgatggaatgatctggaaagagattccttccctgccctccacctgtgagaagcccctctagagtgacatctccatcttatgtttggccacccatcctccccctgggaagagagccgaggtggggtaagggatgtgtactctttcaaggagtgggagaattattctagcgaatgtttgtgttgtcccagttctgtttacaaagcctcgtcatgtttacagatggctgcgcaattcattacctcatttaactctcatgtacctcctctgagggagtaagagctgttacagccaagtttaggtcagtaaatattcaccaagttgcaggtactgcagggcatagagatgaatccgatttagcttctgccctggaggtctgggaacttgctcaagatcactcagtgagcagctgagctagggttctcaactaaagaccctgggcccaggccctggtctgatgtcaggcctgatacaccaggtgtttgtggtcggggaatcccagtgtcacttgaatgggctgtgacattatgggtctgggagagctgagctttggggacacaggtcattttactgtagtattcatggaaaccaagggaagtattggcttttctgctgtgagcaagaggagcagctggggctgcaagctggtggggaggagagaacccacctgagagaaacctcaggactggggtcaagtcctgaccaccagagtccagagagacatgaaggactgtgaccagctctgagcagagagatggattccatgacctcaactggtcccttttgttcggagactcgtgactggacttcattcatccactcattcattcattcactcagcagacacttatctagcgctccctgtggctggtcctgcctcatactgtctttgctctggagaattggaggttggggttcctgaggggcagggtcctggagacaaggacactcctgggtagaattaggacctaccccccaggaaatcaacggggaccaggtgccgtggctcacacctgtaatcccagcactttgggaggccgagacgggcggatcacaaggtcagcagttcaggaccagcctggccaacatggtgaaacccgcctcaactaaaaatacaaaaattagccaggtgtggtgtcaggcacccgtaatcccagctactgaggaggctgaggcaggagaattgcttgaacccgggaggcagaggttgcagtgagccgagattgcgccactgcactccagcctggcgacagggcgagactccatctcaaaaaaagaaaaccaatgggacagggcagatatggggacaatggtaaggagatgggagagtgggagggaggtgtcaggaagaccttcttgacttcatgtaggctggtgggggtgttagccagcaagcctccagttccctgggaaccgttctcagggtaccaattttaccacctgtctgcaaacactttaagattcttaatcagactcaaattggccacaaatcaggtaaacaaactcactagtggggtggggctaccacccgttctgaccctccagcccaacccagcccagccaccctgccctccgtagagcctgtggtgtttatcggtggcattgggagaattagtgtgtatttatgttggcgtggggtgtggggtggatttgtgtgtgtgcagttaggcctagtggaaggaatgtgggatctgaaggcaggccagcctgagttccagtcctgcctgttgctcacaagctttatgaggcgagagctaacccctgccagcctcagttgtcttctttgcaagatggaggttgcagccccagtctctggagcatgttatgcagatccaccgagagtgcctgccaggcacacagtaggtgctcagctcagttactgtggccgcccccactccccattgttgttgttttcctattgcctggcggccacagctggtatcccttgaaaagggctacagggggtggagtcggaccctgccccagccctgtggagaccctgggcttgggccagggcctggggtctgggcctgcagacagctgtgtctataaagcagctgaagggctgaggccgggggaggtcctggcagcagggcgttattttgggcctggcctgccacccccagctcctgtttctcttgggagtctgttgggggaggaagcgtggggaagaggagggggtgcaagtgggtgaggcatggagtggggaggcctccctcagggacatggacccttgagttctatttctgttcctccctcctgttcctccctctttgtccttatctgcctagagaggtgggaatagaggccattctgagtatcactaggagaccaccagtttgtggccactggccactggcccaggcagggaacctgggggcttgccctaccagcctctcccagcaatctgaaggcagggggtacctcgtattaccccctaggatttgaccttaggctccaacttgctgggagagcagtgcctctggtgtcagaccccaagccagcccttgtgctgtccctgaatctgcatgtagcctgttggggaggcggagcagtgaccggcaggaattctgggcagctcaggcacctgtgggcctgagggtgccctctgcccccacccttccgatctcctgggcaagacacgccaggtgattcatctcaccagagcagaaaaacaagttcaactgggcactttaatctcccctcactggcaggcctggtgtgagctgctaccccggcgcccctcaccaggggtgctttacctcctctagtattcctgaccttagtgggcatttctggtctcagggataccaggctggggtccaagtgggccaggtgtggcagttcagccctatgccccatggctgatggctcgcgctgggcaggtatgcagggctgacgtagtgcctttgtggcagcagtttcgtggcacacattctgccagctggttctggagtcttgccctgaggaggtggccagggtgagggtgccagcgcaggaacctttggcgcatgcttcaccctggcctgggatctgcagcctgggtccagatgcccacaactggaatctgacgctccttttctcttcatgggggactcccagaggtctctgcaatgaccagagccccggttgtcccatgcctcagctgcaactccagctgaccctccttccccactctctgggtggcattacgggggtgtggatcccttgccaagaggttggcatgtgggtgtgctggaatggcatagggagaatgcaccgagtttgtttgcttgggagaggggcagggggtatccagaagattcatgattcgtcatcgcctctcttgggggatttttacccctttgccctgagttgtgcctttgggacaaaggaagcctttctttgccagccaacaccctgtactggcgggcgagctccccagggctggcacgctggggcagcctctgaatgcacagggtgggcctagtcagaagaagcctttcccctgaaatccctctacttcccaagcacgcaagctttctcctgctgttaaacctgcagtgtgcaagggacatgggcggaggggtccttcagtcaggcttctccctgtctgaggtggcatgacttggagtgagtttggatggggtggccaggtctgagaaggtcccccgccagtgtcctctgacccatctgctctctcctgccagtgtgcaccggcacagacatgaagctgcggctccctgccagtcccgagacccacctggacatgctccgccacctctaccagggctgccaggtggtgcagggaaacctggaactcacctacctgcccaccaatgccagcctgtccttcctgcaggtgaggcccgtgggcaacccagccaggccctgcctccagctgggctgagccctctgtttacaggtgggtggcagaagaaggtgccctgcccttctgtttcctctcttgttgtggtttctcaaccaggaagtcctttctaacatctaacccccattcattttactgcagaatcagttgactctctctataacgtggctggccgaggtcatgtctcggccatggatgggatgcgtctgtgtttccgctaaatcttgtgctctcttgccagcatgatcatgtcccctgtccacctgctccagccactatccctctcccacttacagcagaagaaagggctggtgagaaaggtggattacaggcccacttctgccactgacgagccctatgaatgtggcctacacccccttagcttcactgggtctcagtttccctatctgtatattgggagcagttgtgaagctcagaagagaaatgtctgtgaaaaggttatgaacaggagggagagtggaaaccaacctgctggatcgtgtccacagaccctggaatggggccacatgcttggtttgtcaaattgcagacgccggccgggtgcgatggctcatgcctgtaatcccagcactttgggaggccgaggcggacagatcacttgaggtcgggagttcgagaccagcctgaccaacatggagaaaccccgtctctactgaaaatacaaaattagccaggcatggtggcacatgcctataatcccagctacttgggaaggctgaggcaggagaatcacttgaacctgggagacggaggttgtggtgagcctagatcgtgccattgtactccagcctgggcaacaagagtgaaactccgtctcaaaaaaaaaaaatttgcagacgccatcccatccaggcctttgctttcactgatgaagaaactgagatacagagagggcagggcacctgttcggagtttatgaaatgcccccccaccattatctttcttgatcatataagaatctggtgaggcaaggtagggcgtgatctttatctctattttatcgttttatttaagcgggaacaggactgctcagtggctgggggccttgcccaagatctccaagtactggggaaccccagggaggccctggggggtggcagtgttcctatttcagccccactctgcttccccctcccaggatatccaggaggtgcagggctacgtgctcatcgctcacaaccaagtgaggcaggtcccactgcagaggctgcggattgtgcgaggcacccagctctttgaggacaactatgccctggccgtgctagacaatggagacccgctgaacaataccacccctgtcacaggggcctccccaggaggcctgcgggagctgcagcttcgaagcctcacaggtggccttcaccgtcattgaaaccttctcttggttattcagagctgaccagggccactgctaaccagggggaggctttgtgtgcattagaaatggtgtcccttctgggcagacgcaggcagagcccgggaagacgccctcagaagattggaaaaagattccccttcttcctgggaagttgtagcttgcgtcagcacatataattcaatcgtgagaatgcaggctgggtttttgcccccacttggctgagtgaagtgtacagtgaacaacctatgtaactatttgctggccctggagccgactctgccccagagtctgggtgccaggtgctttgcccgcatggcccatttcagtcacgctgcagtcctgtcaggaaaaaatcagtgttattctcattctacatatgagaaaactgaggcttgcagatataagggccaaaagttacacagctagtgagtgatggggctgagtttcagactccacagtctcttaaccaccaagcagcatgcccagagtagaggtgagaaggaaggagagagctgcggtccacatgagcatctggacctagcatggacaactcactcctccctggctctcgctttgttcttgttgcgggtgtggtggtggtgggactcaaagacggtaaagatagctttctctcctccctggggaatctgggggttgtttaaaaggcctgctcctcttttagaaggcaggagggccccaagggaagcagaaggtgacagaaggggaaagggtcctctgatcattgctcaccccacagagatcttgaaaggaggggtcttgatccagcggaacccccagctctgctaccaggacacgattttgtggaaggacatcttccacaagaacaaccagctggctctcacactgatagacaccaaccgctctcgggcctgtaagccatgcccctccctgctgcctcttctctcagacagcctgaccccagccgcaaactcccaacttacaacccagtgcctgcccgccactgccccagccgcctacaccacccatttcctccctctctgtccctcctgccatctccctgtgcctcttcatctctggggttctctgtcttgtctccctctgcttataggttgtgcctctggtttgggggcctctcagcctgtctgggtccctcccttgctgtgcagttggcctcgtggcctctgctgctgtttgtgcctctctctgttattaacccgtcctctcgctgttagacatctctctcactgcctgtctctggttctgtcctcaggccacccctgttctccgatgtgtaagggctcccgctgctggggagagagttctgaggattgtcagagccgtgagtctcagggaggcctggagtcagggaaggggagggctggggccgggtggaatgcaggtgtcatacaggtgacatgggaggggtgggataacaggcttgggatgtctcccctgggccaggtagtctccctagaaggtgatgctgatgagggtctggtgcccagggcgccactcagccctcatcctgccctttgcccaacagtgacgcgcactgtctgtgccggtggctgtgcccgctgcaaggggccactgcccactgactgctgccatgagcagtgtgctgccggctgcacgggccccaagcactctgactgcctggtatgtgcctctgctttgtgcccaatgtgctctaccccccaggatgcaaggggtgggcaccctgcctggtactgccctattgcccctggcacaccagggcaaaacagcacagtgaaagccagccacctgtccccccaggcctgcctccacttcaaccacagtggcatctgtgagctgcactgcccagccctggtcacctacaacacagacacgtttgagtccatgcccaatcccgagggccggtatacattcggcgccagctgtgtgactgcctgtccctgtgagtgccagggagaaacacagttttctcattttggtggggaggtttgtttctgtaaatgggagcatatggggagcactgtctgcatcttgctttgagagctggtcatgacagttcctgccgagctgccttgttctttcaacagctgtggagcaggtggcagtaaggagaggcagctaagagcccagacttgggagccagactgcctgggtttgaaacccagctctatcaattagtaggcacgtgaccctcttgctgtgcctcagtttcctcatcagtaaaatgggggcaagaatagtcccaactgcataagatggttataacatttgaaagagttaatatttgtaaagctcttagaacggtgcctggtatgtactaagtgctcctaaatgttagcttttattctatagcctggtgaggtcagttttacctttcgttttgtttttgagaccgaatttagttagctctatcgcagtggcgcgatctcggctcactgcaacctccgcctcccaggttcgtgctattctcgtgtctcagcctcctgagtagctgggattacaggcgcccaccaccatgcctcgctaaattttgtatttttagtagagacagggtttcaccacgttggccagactggtctcgaactcctgacttcaggcgatccacctgcctcggcctctgaaagtgctgggattacaggcgtgagccactgcacccggacttttttttttttggcagagtctcgctccattgcccaggctggagtgcagtggtgcaattttggctcactgcaacctctgccttccgcattcaagcaattcttgtgcctcagactcttgagtaggtggaactacaggcatgcaccaccatggctgggtaatttttgtatttttagtagagacggagtttcactatgttggccaagctggtctcgaactcctgacctcaagtgatccacccgccttggtctcccaaagtgctgggattacaggcatgagccatcgtgcctggcctagctcagttttatttaacagatcacctatttactgatgggcgtttatggactgggctcagacctggggaacctctttcctcctctcacaggaacaggagtgggccttcagatcctggctgactgtgttagggagaggacaaaatgtagagccagaccatttgggttcaaatcctcgctcctccactcactagcacaatgaccttgaataatttacagaactctctgctttggtctccctttttgcaaaatgggaatctcacagtgctgatcccgtctggttgttgtgaggggtaaatggatgtcaggtgctgatgcgtggtagggcatttaagtattggttgatattattcttcttgtgcctgggcacggtaatgctgctcatggtggtgcacgaagggccagggtatgtggctacatgttcctgatctccttagacaactacctttctacggacgtgggatcctgcaccctcgtctgccccctgcacaaccaagaggtgacagcagaggatggaacacagcggtgtgagaagtgcagcaagccctgtgcccgaggtacccactcactgcccccgaggccagctgcagttcctgtccctctgcgcatgcagcctggcccagcccaccctgtcctatccttcctcagaccctcttgggacctagtctctgccttctactctctacccctggcccccctcagccctacaagtgtccctatatcccctgtcagtgtggggaggggcccggaccctgatgctcatgtggctgttgacctgtcccggtatgaaggctgagacggccccttccccacccacccccacctcctcagtgtgctatggtctgggcatggagcacttgcgagaggtgagggcagttaccagtgccaatatccaggagtttgctggctgcaagaagatctttgggagcctggcatttctgccggagagctttgatgggtaagagtgggcatgatgacctgagacagtgtcagggcagacagagtcctgaggatccagatgtggcagcatctcttggggatggcaggagacagaagtggggggatcaagaatgcaaagaaagcagatgggagaccagaggagcagggcctttggtgggtgggggtgattatttttgtaaatgacatgctatccgtgaacaaggacttgtatggaggtcagaccatctagataaagtaaaattccctttgagttcatagcagctttattcaaaatatccccaaattggaaataactcaaatgtgcatcactaggtgaaggaataaacaagtggcagtgtatccatttggtgaagttctacttagcaaccaaaggaaatgaactaccgatacaacataaatgaatctcagaaacattacattgagcaaaagaagccagagacaagattccatactgtctgatcccctttatgtgaggctctgaaccgaaaaaaccactctgtggtgggagagatcagaacggtggttgccccagggtggggggcttcaaaagggaggcacacaaggacatttctggggtaatagaaatgctctgtatagtgattggggtagtggatacatgagcgaatccatttgtcaaaactcatcaaactgtgtgataagagtctgtgcattttatttatttcattttattttttgagatagagtctcactctgtcagcaggctggagtgcagtggtacgatcttggctcactgcaacctctgcctcctggattcaagcaattctcctgcctcagtctcctgagtagctgggactacaggtgtgtgccaccatgcccagctaatttttgtatttttaatagagatggggtttcaccatgttggcaaggatggtctcgatctcttgacgtcgtgatccgcccacctcagcctcccaaagtgctgggattacaggcatgagccaccacacccggtgcattttattgtatataagttatacttcaataagaaatgaattggggccaggcacggtggctcacgcctgtaatcccagcactttgggaggccgaggcaggcagatcacttgaggtcaggagttcaagaccagcctggccaacatggtgaaaccccatctctactaaaaaatataaaaaattagccaggcttcctggcatgcgcctatcatcccagctacttgggaggctgaggcaggagaattgcatgaactcgggaggtggaggttgtagtgagctgagatttcgctattgcactccagcctgggcgacagagtgagaccctgtctcaaaaagaaaaaaaaaaaaaagggtcaggcgccgtggtgcacacctgtaatcccagcactttgggaggctgaagcaggaagattgcttgagcccaggaattcaagaacagcgtgggcaacatagtgagatcccatctctacaaaaaaacacaaaaaattagccgggcatggtggtacgcacctgtagtctcagctactagggagactgaggtgggagaatcacctgagcctgggaggtggaggttgcagtgggttgaaatcatgtcactgtactccagcctgggtgacagaatgagaccctgtctcaaaaaaaaaaaaaaaaaaaaaattccctttcacacttcctttacctccactcccctttccagaggggaccatggttaacagtgtgtgtgttcacctagaccgtttatgcatctgtagacacacacacagtgaagtgtggttttcgtcgttttggtggggaggttggtttctgtaaatgggaacatatagggagcactgtctgcaccttgctttgagagccggtcatgacagttcccattgaactgccttgttctttcaatagctgcagagcaggtggcggcaaggagaggcagctaagagcccagacttgggagccagactgcctgggtttgaaacccggctctaccacttactaggcatgtgacccttgtgctgtgcctcagtttcttcatctgtaaagtgggggcaagaacagtcccaacttcataagatggttataccaccatgcctggccagatgattataaagtttgaatgagttaatatttgtaaagctcttagaacagtgcctggcagatactaggtgctcctaaatgttggtttttattatgtggctgggtggctcggggttttatttaacagctcccctatttactaatagacatttagatcatgttccattttcactcttacaaacagttccactttgtgtgtggctctgggaacatgggccagtgtctccctaggccacattcctagaaataagatttcttttcttttttttttttttttgagacagagtctcgctttatcgccaggctggtgtgcagtagtgtgatctcggctcactgcaacctctgcctcccgggttcaagtgattctcctgcctcagcctctcgagtaactgggactataggcgcgcggcaccacacccagctaatttttgtatttgtagtagagatggggtttcaccatgttggccaggatggtctccatctcttgacttcgtgatccgcccgcctcggcctcccaaagtgctgggattacaggcgtgagccactgagcccaggcagaaataagatttctagatcaaaggatataaatactgttttgatagatgttgccgaactaaggcctgggctttgaagcccaggatgggaacagctgggctcgatgggcaaagggtttgagtgaaggcattcatggtggggagtggctggcatggccagtgctgggagtgatgtccaccctgttcctggccctgctgactcctctcctgacccctccagggacccagcctccaacactgccccgctccagccagagcagctccaagtgtttgagactctggaagagatcacaggtgggctctgtctctgcatcctgttctgcaggggctgggagtccttgtcctgtccccactcctttaatctcaccctctgcctgcaggttacctatacatctcagcatggccggacagcctgcctgacctcagcgtcttccagaacctgcaagtaatccggggacgaattctgcacaagtgagcactgagaaagagggggcctgatggggaggagtcccagggaggagtccctgtgggaagctttgggcctgagggagtactcctgtagcagtaacctttccatgaaagtctgcagagtgtgctggggatggaggaagatgagaatagcctttgctgaccgggaaggggtccgtggtaaggtgcccacctttctcccatagtggcgcctactcgctgaccctgcaagggctgggcatcagctggctggggctgcgctcactgagggaactgggcagtggactggccctcatccaccataacacccacctctgcttcgtgcacacggtgccctgggaccagctctttcggaacccgcaccaagctctgctccacactgccaaccggccagaggacgagtgtggtaagacagggagcccagtgtgcgcactccccatctgccagcacacagcagtgcccagggggccctggcagcagcgttcttggacttgtgcagactgcccgtctctgtgcacccttcttgactcagcacagctctggctggcttggcctcttggcatggcttctctagctgggtcctacctgccttggcatccttccctccccctctgtttctgaaatctcagaactcttcctctccctacatcggccccacctgtccccacccctccagcccacagccatgcccacagccagttccctggttcacttggacctggggcctcccctaaaagtcccctgcggtcccttcctcctcactgcagtgggcgagggcctggcctgccaccagctgtgcgcccgagggcactgctggggtccagggcccacccagtgtgtcaactgcagccagttccttcggggccaggagtgcgtggaggaatgccgagtactgcaggggtatgaggggcggaggagagggtggctggaggggtgcatggggctcctctcagaccccctcaccactgtcccttctctcaggctccccagggagtatgtgaatgccaggcactgtttgccgtgccaccctgagtgtcagccccagaatggctcagtgacctgttttggaccggtgagctgctggcgggctcagagctgggtggaggggggcagcgagggggattgccagggacttggcaggatggcgagatgcagtagggtgtgctatctggtaaaatatccctggagagggctcagcgctcagacctgaacagcaacagagtggcagaaaaggggcctgggggacactggggcccttcagactatgaaaaggttctaaggaggtctgtgttggtggctgtgactgtggctgtgctagggtggtgagccctgtgggctcaggcgtcagactacctggattcagacccagctcctgcttccaaccttggttttttattcctaaaatgggtattgtaataatacctaccttgctggggtgtggcaagaatgaaattaaacagggcttggcacagtgaagcacgggaaaggctttctacagagcagtgactgttgttactcgctgttacaccttaggtaatgcgttttcctctctgggtgcctcccattttctggctcaagtccctgcccaggatcaagcttggaggagggccccgagggaggggccacagagactgggtgaagagcaagggtgtttgtcccaggagcatggcgaaaattgctgctgggtggccttgggaagcacaaaggggacccaactaagggcctgatcctactgccctgggggtgtcagtgccagccccccacaaatcttttctgccccccccaggaggctgaccagtgtgtggcctgtgcccactataaggaccctcccttctgcgtggcccgctgccccagcggtgtgaaacctgacctctcctacatgcccatctggaagtttccagatgaggagggcgcatgccagccttgccccatcaactgcacccactcgtgagtccaacggtcttttctgcagaaaggaggactttcctttcaggggtctttctggggctcttactataaaaggggaccaactctccctttgtcatatcttgtttctgatgacaaaaataacacattgttaaaattgtaaaattaaaacatgaaatataaattaatgccctagcagttctatccccactgttaataatttgaaatatttttcctctagttatttttgtctgtgcacattctaatatgtatatataagttaacatatattaatattattctccagttatttttatctgtgcacattttaacacacacacacacacacacacacacacacacatatgtatttttagacggagtttcactctgtcgcccaggctggagtgcagtagtacaatcttggctcactgcagcctccacctcctgggtttaagcaattctcctgcttccgcctcctgagtagctgggattacgggaacgtgctaccttgcctggctaatttttgtatttttagtacataggatttcaccatgttggccaggctggtctcgaacccctgacctcaggtgatctgccagcctcggtcccccaaagtgttgggattacagcggtgagccaccatgcccagtcatatatttctttttaacaaatagaatcatagatcatacatattgtttgcaaattgctttttctcactttccagaaccttgaaatgtttttccatgttctaacatggtgatctaccttattcttttaatttttcttatttagttgtctttacacatgaaacacatgaatacatccttgtgataaacattttcagtaacataaaagtataaatgttacaaagccaacgtgccctttcactcaactccctgtccacccagtctctcctgtctgctgggagaaccaccgcattgacttgtgtgttcacccttccaggctcttttctgcacacttatatagacatactacatttatattaggtcgagtcaaataagattgctgtttgtgtaaaccaaaaagtgtcaagagcctgggcgcagtgactcacacctgtaatcccagcactttgggaggctgaggcaggcagatcacttgagatcaggagttcgagaccaatctggccaacatagcgagaccccgtctctactaaaaatacaaaaactagccaggtgtggtgatgctgttctgcactttgctttccccccgacttgaggtatcctttcttgtgagtacagacggatctaccacctttattttttttttaattactcaacctgtaacatggatgtaatttcactttgtttttgagggatattgagcttgtttccctgtttttgcagtttattgcaattgagctccacacacaagtgagccctcttttgtatgccccctagtgggaatacagtgctggcaatgtttatcacaaggatatattcatgcatttcaatttaaagacaactaaatgagaaaaattaaaagaatatggatccaggctgggcatggtggctcacgcctgtaatcccagcactttgggaggccgaggcaggcagatcacctgaggtcaggagttcaagaccagcctggccaacatggcaaaaccccgtctctactaaaaatacaaaaattagccaggcgtggtggtgggcgcctgtaatcccagctatttgagaggttgagacaggagaattgcttgaacctgggcagcggaggttgcagtgagacgagattgcaccagtgcactccaacctgggcaacacagtgcaactccttctcaagaaaaaaaagaaaaaaaaaaagaatatgggtccagatccatatggatcctagatccagatcacggtgttagaacatggaaaaacattgcaagattctgctaagtgaaaaaagcatttgcaaacagtatgtacagtctatattcagaggaggaactgctgggtcatagatgatatttcataggtattgccaaaccgttctctggagaagtggtatgggtttaccctgggattcttctatggagggaatagttgagctcccgggcttgctcttctgggtgcccctccccgcttcctatccaccacaaggagctgcaggggagcggggcatgccggttccttggctggagaaggagtctccttgtgaggtggtagaaggagcactgacggccttgagcccagtttctgcctttgtcaaatggggataatgacccagccacacccctcccagggttgttgtgaggctggaaaggtggttcccaagagggtggttcccagaattgttgatgagactgtttctcctgcagctgtgtggacctggatgacaagggctgccccgccgagcagagagccaggttggcctggaccccaggatgtacccttcattgcccttcactcccccactggatgctgggtggtcactgctgtagggaggggaccccctgacatatgtcccttcccacccactcttccactgtggaacctcctgtcattttccacttcaccaagtgacagaggacctgctcagatgctgaggggaggggactgcaaggaaagatggctaggaaacccagtccctccacaccctagagtaacttgatgccttgtgagggacacaggcaaagttcaattccttggaagtcaagggagactgagaagagtacagctgcagcactgagggagtgatgaattcttaactggggatggtgggaggcttcgagtgggaggtggcatttgagctaggctttgagagaggagcaggtattgcacttgcatttaggtagaaagcattggggtgcaaggtgacactggagggggaggcatcaggaaatccaggatgtcttcaaagttctggtgtcgggggctgttgagtaagcacaggaataagggggtcaagttagagtcagggtggggtctgacctggatgccataggacctgatccccaagccacagggtgggacttgactgggcagtggggacctttggaaaggactttggggagaaaaacagactggagtctgtcttaggcgatcatcggtccgtgaaatgagcatgtgttacaggcttggtatgtaccagaccctgtgctaagcaagggggtgtggagaggagagggtgacaagaatattggatcaacacccgggagctccatctatcccaggatgcactatcttttttttatttttttgagacggagtctcactctgcctgcaggctggagtgcagtggctccatctcggttcactgcaacctctgcctcctgggttcaagcgcttcttgtgcctcagcctcccaagtagctgggattacaggcacatgccaccacacccagctaatttttgtatttttagtagagacggggtttcaccatgttggccaggatggtctcgatctcttgacctcaagatccgcccaccttggcctcccaaagtgctgggattacagacatgagccaccgtgcccagccagatacgctatctttttattgagtgattgagacagggtcttgctctcttgtccagtcttgaatgtggtggtgtaatcacaggctcactgcagccttgacctcctgggctcaagttacccttctgcagtagctgggactataggagcgtgccaccacgcctgggtaatttaaaaaattttttttgtatagacagggtctcactatgttgcccaagctggtctcaaactcgtgggctcaagtgatcctccagttttggcctcccaaaatgttgggatcacaggagtgagccaccactcctggcgatgagccaagtctttttttttttttttttttttgatatggagtcttgctctgttgcccaggctggagtgcaatgacacgatcttggctcactgcaacctctgcctcccaggttcaagcagttcaagcaatcctcctgtctcagccccccagtagctgggattacaggcatgcgctaccacgtccggctaatttttgtatttttagtagagatgaggttttgccatgttggccaggctggtcttgaactgctgacctcaggtgatccacctgcctcggcctcccaaagtgctgggattacaggtgtgagccatcgtgcctggcggagccgagtcttaaaagatgaccctgtggagaaatggtggtccaggctgaagggacagcctatgcaaacactgggaggtgtggaaaatcatgacctgtgggtggaaattttggctagaacatcaaaatcatcaggtgtacattcctgtacccatgcagcagtcagaatctctgggggtggggccccaaaattgtatgcatacagactgtgtgctgatttgtgatattacttaggattttttgactttacaatggtggaaaagcaataatatacattcagtataaaccgtactttgaatacccatacagccattctgtttttcacttttatttttatttatttatttatttattatttattttgagatgtcattttgctgttgttacccaggctggagtgcaatggcgcagtcttggctcaccgcaacctccacctctcaggttcaaacgattctcctgcttcagcctccagagtggctgggattacaggcaggcaccaccacacccggctaattttgtatttttagtagagacggggtttctccatgttagtcaggctggtctcgaactcgagagctcaggtgatctgcccatctcagcctcaagccaccatgcccagccctactttcagtattcaataaattacatagccaggcaccgtggctcacacctgtaatcccagcactttaggaggccaaggtgggaggatcctttgaggccagaagctcgagaccagcctgggcaacatagtgagaccccatttctacaaaaaataaaaaaactagctgagtgtggtggcgtgtgtctgtagtcccagctacttgggcagctgaggtggaaagactgcttgagcccagaggtcagggctgcagtgggccatgatctcaccactgcactcagcctgggcaacacagcaaggccctgtctcaaaaataaataaataaataacacaaacttatttaacagtttactataaaataggctttgtgtcagatgattctgcccaactgtaagctgctggcagtgtaaatgttctgagcacgtgtaagccaggctaggtgtcttaaatgcattttcagtttcaacttagaattggtttatcaggacgtagccccttggtgttgaggggcatgtgtattaacagtctccttagtgacttttttttttttgagatggagtcttgcactggccgtagtgcagtggcgcaatctcagctcactgcaacctcttgtctcccgggttcaagcgattctcctgcctcagtctcccaagtagctgggattacaggcacccacaccacgcccagctaatttttgtgtgtgtgtatttttagtagagacgggggtttcactatgttggccaggctggtctcgaactcctgaccttgtgatctgcccacctcagactctcaaagtgctaggattccaggcatgagccaccgcgcccagagtccttagtgatttttacaccatgaattgttgaagccctaagccagagccaagggcaagagtatagagaatctggagatgcggagagggttctgattgcctacaaggagtttggactttattgtggaggcagcggggagccaaggcaggttttagagtaggagagggtccaagcctgtgggtcacccttccgacttccctttccgaatgccaaacaccttcatgtcccccgtgggccccctttgtccctcccaccccaaactagccctcaatccctgaccctggcttccgcccccagccctctgacgtccatcatctctgcggtggttggcattctgctggtcgtggtcttgggggtggtctttgggatcctcatcaagcgacggcagcagaagatccggaagtacacgatgcggagactgctgcaggaaacggaggtgaggcggggtgaagtcctcccagcccgcgtggggtctgcaccggcccccagcactgacccaccaccccctcaccccagctggtggagccgctgacacctagcggagcgatgcccaaccaggcgcagatgcggatcctgaaagagacggagctgaggaaggtgaaggtgcttggatctggcgcttttggcacagtctacaaggtcagggccaggtcctggggtgggcggccccagaggatgggggcggtgcctggaggggtgtggtcggcagttctgatgggaggggcaagagctggaggcagtgtttgggggagggcagttacagcggagaagggagcggggccaagccctagggtggtgaaggatgtttggaggacaagtaatgatctcctggaaggcaggtaggatccagcccacgctcttctcactcatatcctcctctttctgcccagggcatctggatccctgatggggagaatgtgaaaattccagtggccatcaaagtgttgagggaaaacacatcccccaaagccaacaaagaaatcttagacgtaagcccctccaccctctcctgctaggaggacaggaaggaccccatggctgcaggtctgggctctggtctctcttcattggggtttggggagatatgactcccgcaaacctagactatttttttggagacggagtcttgctctgtcacccaggctggagtgcagtggcgttatctcggctcactgcaacctccacctcctggactcaagcgattttcatgcctcaggctcctgagtagctgggattacaagcgcccgctaattttttttttttttttttttttttttttgagacagagtctcgctctgtcacccaggctagagtgaaatggtgcggtctcagctcagcctcccaggttaaagcgattcttctccctcagtctcctgagtagctgggattacaggcgcgagccaccacgcccggctaatttttgtatttttagtagagatgggatttcaccatgttggccaggttggtgtcaaactcctgacctcatgatccgcccgcctcggcctcccaaagtgctgggattacaggtgtgagccaccgtgcccggcctaatctttgtatttttagtagagacagggtttcaccatgttgtccaggctggtactttgagccttcacaggctgtgggccatggctgtggtttgtgatggttgggaggctgtgtggtgtttgggggtgtgtggtctcccataccctctcagcgtacccttgtccccaggaagcatacgtgatggctggtgtgggctccccatatgtctcccgccttctgggcatctgcctgacatccacggtgcagctggtgacacagcttatgccctatggctgcctcttagaccatgtccgggaaaaccgcggacgcctgggctcccaggacctgctgaactggtgtatgcagattgccaaggtatgcacctgggctctttgcaggtctctccggagcaaacccctatgtccacaaggggctaggatggggactcttgctgggcatgtggccaggcccaggccctcccagaaggtctacatgggtgcttcccattccaggggatgagctacctggaggatgtgcggctcgtacacagggacttggccgctcggaacgtgctggtcaagagtcccaaccatgtcaaaattacagacttcgggctggctcggctgctggacattgacgagacagagtaccatgcagatgggggcaaggttaggtgaaggaccaaggagcagaggaggctgggtggagtggtgtctagcccatgggagaactctgagtggccacctccccacaacacacagttggaggacttcctcttctgccctcccaggtgcccatcaagtggatggcgctggagtccattctccgccggcggttcacccaccagagtgatgtgtggagttatggtgtgtgatggggggtgttgggaggggtgggtgaggagccatggctggagggaggatgagagctgggatggggagaattacggggccacctcagcatgtgaagggagggaaggggctgcctgtgccccaccttgcagggtctgtgcacttcccaggattagggaaagaccgggtagggtctgtctcctggcatcacatctccccctgctacctgccatgatgctagactcctgagcagaacctctggctcagtacactaaagctccctctggccctcccactcctgaccctgtctctgccttaggtgtgactgtgtgggagctgatgacttttggggccaaaccttacgatgggatcccagcccgggagatccctgacctgctggaaaagggggagcggctgccccagccccccatctgcaccattgatgtctacatgatcatggtcaaatgtgcgtggctgagctgtgctggctgcctggaggagggtgggaggtcctgggtggaggagcccacaaggggcatgaaaggggaccaggatgtatgtagacccaggagccctagtatgttaggagcctcaaaaccttcttgtatcccttttacagtcaaagtccaaagccactcttgaggaacactcttgtacaaaattaagctgggcacagtggctcatgcctgtaatcccagtacttttggaggctgaggtgggaggatcccttgaagccaggagttcaagaccagcctgggcaacatagtgagatcctatctctacaaaaaataaaaaaattatctgggtgtggtggtgtgtgccagtagtcccagctactcaggagaggctgaggcaggaagatcacttgagcctagtttaaggttgcagtaagctatgattgcaccactgaaatccagcctgggtgacagagcgaaacctcatctcaaaaaaataaaaaagcaaacaaaaagaaaaaaaaaattaaaagggaaactagaagagatgccaaaggttctggctgaagaccccagagtctggtgctacttctctaccacctgagggctttgggctgtcccttgggactgtctagaccagactggagggggagtgggaggggagaggcagcaagcacacagggcctgggactagcatgctgacctccctcctgccccaggttggatgattgactctgaatgtcggccaagattccgggagttggtgtctgaattctcccgcatggccagggacccccagcgctttgtggtcatccaggtactgggcctctgtgccccatccctgcctgtggctaagagcaccctcctgcagagggtgggaaggagagatgagtccagtatgccaggcccctcacggaaggctgcatgctgggctggggaggggccaccatcctgcctctccttcctccacagaatgaggacttgggcccagccagtcccttggacagcaccttctaccgctcactgctggaggacgatgacatgggggacctggtggatgctgaggagtatctggtaccccagcagggcttcttctgtccagaccctgccccgggcgctgggggcatggtccaccacaggcaccgcagctcatctaccagggtcagtgccctcggtcacactgtgtggctgtctgcttacctcccccaaccccggtggactagggtccctttctctgatgttccctcaactgtcacctctcaaggaaaccccattatccctacaaaaaattcttactgccttccaacccctgtgaccccattctctccacggtgactgtgtcataccccaaaggtgacctctgtttttctcctgtgaccctgtcaccttccatggagtccccatcccagatccgtgagtgacccccatcatgactttctttcttgtccccagagtggcggtggggacctgacactagggctggagccctctgaagaggaggcccccaggtctccactggcaccctccgaaggggctggctccgatgtatttgatggtgacctgggaatgggggcagccaaggggctgcaaagcctccccacacatgaccccagccctctacagcggtacagtgaggaccccacagtacccctgccctctgagactgatggctacgttgcccccctgacctgcagcccccagcctggtatggagtccagtctaagcagagagactgatgggcaggggaggtgggaccttcagcccagggtccactgtgggggcagagggagtggcagagacaccggggttccttcccctaatgggtcaccttctcttgacctttcagaatatgtgaaccagccagatgttcggccccagcccccttcgccccgagagggccctctgcctgctgcccgacctgctggtgccactctggaaagggccaagactctctccccagggaagaatggggtcgtcaaagacgtttttgcctttgggggtgccgtggagaaccccgagtacttgacaccccagggaggagctgcccctcagccccaccctcctcctgccttcagcccagccttcgacaacctctattactgggaccaggacccaccagagcggggggctccacccagcaccttcaaagggacacctacggcagagaacccagagtacctgggtctggacgtgccagtgtgaaccagaaggccaagtccgcagaagccctgatgtgtcctcagggagcagggaaggcctgacttctgctggcatcaagaggtgggagggccctccgaccacttccaggggaacctgccatgccaggaacctgtcctaaggaaccttccttcctgcttgagttcccagatggctggaaggggtccagcctcgttggaagaggaacagcactggggagtctttgtggattctgaggccctgcccaatgagactctagggtccagtggatgccacagcccagcttggccctttccttccagatcctgggtactgaaagccttagggaagctggcctgagaggggaagcggccctaagggagtgtctaagaacaaaagcgacccattcagagactgtccctgaaacctagtactgccccccatgaggaaggaacagcaatggtgtcagtatccaggctttgtacagagtgcttttctgtttagtttttactttttttgttttgtttttttaaagatgaaataaagacccagggggagaatgggtgttgtatggggaggcaagtgtggggggtccttctccacacccactttgtccatttgcaaatatattttggaaaacagctaggcaccggcctatgtctgggggtggctctgtgccatcccttcctgctcaccttacactcaattcctcttttcctggagggagtggctgggaatcttcagaaagcttggatgaggagccagacatccagttctccagcttcagggttgggggagatcgggaagctggattcagatctgagagccctttgacgaccagatcattcttatttagaacgaactaattcctaaggccactcaccagaatggggttatttcctccttgtgagtgaggagagtggtgggtagggtgggggaaagacgaggcagggtctactgtgggactcattttccttgccttggctatgccagaggagctcactgacctaaggagtagctgtccagaaagcccacccagccagcacagccaccctggcggtacaaaggctgggctgaccggacttctgtgccccccacattcccagactggacgtataaaaacacacactagttagcattagtgtttgtagcgccactttactgccaatagctgacattgccctgggttaggggagaataaataaaatctgtggcatcagacaggtattaccgaggcgaagagtggactgggctttcgtgggcacttaccctgggaagggggtatgaggtggctggagaagtgttcatggagagtgtctctctcctgcccccaaggccacggaatcttctattccttctttgtacccaaaggggcaaagtggaggccagggtctctttgctaaggagctaagtaggggaaagaggcagggggagctcccagcaggaccaaagggagaccaaggtttggaccccagaacagagcaggaacccagagtcctgtgcagtcacaggatgacgcagggaggacggctgttggtgatcttttctagggtttctccattactggctcttcggatggcctcaatgagctagaggagtggaatgacaggatgatgcactgttggggtagggtgaccaagaggtcctcccaacgctgtaaatactcacatctttctcatagggaaagc

SEQ ID NO: 6 - protein, 1255 aa, Homo sapiens [sequence omitted]

SEQ ID NO: 7 - DNA, 59574 bp, Homo sapiens
  ADAM metallopeptidase domain 9 (meltrin gamma) (ADAM9), transcript variant 2
tgtaatttagttgtttatttactcatttgttcaacaaatacttattgaatatttgctctttggccagtcaagggatttcatgagtgtctactatgtgaataacactgtgttggccactagtctgtcacctactggtggattagaaaaatagcgcgaggaccattttttcttttcttttctttttttttttgagacggagtcttgctctgttgccaggctggagtgcagtggcacaatctcggctcactgcaacctccgcctcccgggttcaagcgattcctctgccgcagcctccccagtagctgggattacaggcaagcgccaccatgcctggctaatttttttgtattttagtagagacggggtttcaccttgttggcaaggatagtctcgatctcctgacctcgtgatccacccgcctcggcctcccaaagtgctgggattacaggcataagccaccgcacccggccaactcttttcttaaattagccagggaggcgtgggtgggttgggtgaggagttgggtggggggatctcattcagtattcaaacttctacaagtttcggggttgaggtgggtgatggtaagggaacaggccctgccactacctttcatagtgacttccatttgtgtaatatttttggtccactgagagctattattttatttgattcttatgaccatcttgtgaaggagtatcaacagataccccgttttgattttatcagatgcatgatttgtcctacatcaaacttcataaatgatggacagaatggaggaatccttcagaccaagtgctgcctacttcccaccccaatggtggcctcagcctgggctcacatcacacgccccaaggagccttggaaaaaataaaggctcttggctccttcctgggacagcgtgattcctcatgtctgagcaggcccatgaacttgtatttttcagacgttccctaggacccgtgtccatctggattagggaaccactacattataccacttcgcgggaagactcagggggaagcattttagccactttcctgtgttccacagtactggagggtgttctgagtgggctgtgattaatttccaaaccaaccacacgtctcccctcaactcccactgcttactctttgcttcctagacattcactgcaggctggagacttctggaagccaacagcatcgctgtagaatttacagggtccagttcccggtggaccacaaaacctaaattatgtggctggggaaagctgaaatccaagggaagggtttgaggaggggctgaccttataataaaaccggcttgtatttactaagtgttaactatgcgctaggccctcgttgacgcctcaactctatgtgaaaagcactattatcccccatttacagatgggaaaacagagatttagagcgcgaaaatcatttccccaaggcgcacagactccaaagcccacgctaccaggtacaacctcaaggctgcggcgtctcttcacctgccccctagcccccaaaccgctgctatgtctagggcctgacattccggcgccctctgggacgtgctcagatgcaggggcgcaaacgccaaaggagaccaggctgtaggaagagaagggcagagcgccggacagctcggcccgctccccgtcctttggggccgcggctggggaactacaaggcccagcaggcagctgcagggggcggaggcggaggagggaccagcgcgggtgggagtgagagagcgagccctcgcgcctcgccggcgcatagcgctcggagcgctcttgcggccacaggcgcggcgtcctcggcggcgggcggcagctagcgggagccgggacgccggtgcagccgcagcgcgcggaggaacccgggtgtgccgggagctgggcggccacgtccggacgggaccgagacccctcgtagcgcattgcggcgacctcgccttccccggccgcgagcgcgccgctgcttgaaaagccgcggaacccaaggacttttctccggtccgagctcggggcgccccgcagggcgcacggtacccgtgctgcagtcgggcacgccgcggcgccggggcctccgcagggcgatggagcccggtctgcaaggaaagtgaggcgccgccgctgcgttctggaggaggggggcacaaggtctggagaccccgggtggcggacgggagccctccccccgccccgcctccggggcaccagctccggctccattgttcccgcccgggctggaggcgccgagcaccgagcgccgccgggagtcgagcgccggccgcggagctcttgcgaccccgccaggacccgaacagagcccgggggcggcgggccggagccggggacgcgggcacacgcccgctcgcacaagccacggcggactctcccgaggcggaacctccacgccgagcgaggtaagagccgcggcgcccccggatctggggcgggcttggcgtcccgagcggcccccggcgccggagcctcccggctgcgcgctttgcccgccgcagcccagccggggccggcgcctccctccgctcgccgcccgcccctttcacctcctggctccctcccgggcgatccgcgccccttgggtctcccctcccttccctccgtccgcgtctcctgcgccccctccctgcgctcgtcccgccgctcttcccgccgcccaacttttcctccaactcgcgctcgggagctggcgaggcggcggcggctcctcagtgagtcccgggagggacaggcccggggcgaaggcggcgaggcccgcggtttcctggactggggaggagggcgggagtgggcggcgaggtgggatgcgttgtgtgtgttatgtgtgtgtgttgcattccactccatgtctttttggtccccttttggggattcacccccaattcagcaggtagctttgggctcaacgctaaaaatccggggcattcctaagtccttttccacccccgggaaagcctggggtgcgggttggggtcggatggggtgggagatgaactgcggaggacgtggagggctaggttagcttctcttggaataggttttaaggaggtgtcgtcaccaaatggctgaatctgcttgagctgagagcgaaaaacgactcccctttccagaaggggtgatcttatgacttggacggtctctgaaagggtcggaagtttggggaacgggaggacaacccacggtcgttaagccgaggtgtgggatgggggcggaaggaccgttcggtcccaatctggttcctagaggtgggggaagggatgagggtttttgtccggtgtggttcactcggcagcgatgcgtatgcttctctggcccagacccctctgcacctcgcttcccctaccgttatgtttggggttgggagaaaagtgaggctacgacccatgtttgcggaggaattttatggaccttgtagatgggggttcatatagaacacacaccccctatgaggcagccagacacttttttggtggtggtggggggggggtggggtgtgaagcctgtttcttgttctgagcccagaagctatcaacccttttgaaaaacattaccacggtgcctttctcccccagcactcccccacccccaatttccagatgtagcagccgcatctggttccgtttcaccccacacgggtacaccgcagccgcattattaacttccctcttcctcccctccccctcccccaaattaaaactcagattcttcagcctgtcttgaccacctccctccttaacatttctggagacttggagatgcggcgttgagattcgggggagaaaagaaagttcccttggatcccgagttatttaagatctcaccaagttattcgccgccgctggtgggtggcggcggtccgggtgctttctggattgcgcagtaaagaggcatcttgggagatggggccaaggttttagggggtgccactcgcgaacggttcatccgctagactaggggggctctttggctgtgcgtctggccagaactggccttgacgatggaagtttctggaaccaaagcgttgctttctctcccttgtgttatagctggagctgcgggagcgcctgccctgcccggagcccgcggtcccctctcggctgccccgcggtggcgtcacgcgcccctcccggagcaagcccggtgcgcagggccgggggcgtgggcggctgctgccagaggcgctctctgtgtgtttttaaggactgatttgggccgcatcccccggaaactaaagtggggtgttttaccgtttaaataacggctacaggtttgaaagcggggttggattttcgagttgtgtttggtaatagtctttgaggcaggaaagcgccttgtggtccaaagttgccgggagggtggggagagtcggtgtcttacccgcttctttccagcctctttcaaattgaaaacacttctctggtttccttctttgggcggtagttttggaggctgtaatgaaatcgcactttctctagacgtggtaattaaggtgactgtttcctccgcagatgtgccctaccctttgcacctccggaccagcgctttttttggaatactatctagccttgagactgtttagcagaaagtggccattttcctcccttggcccgggctcccggtttcctccctgaggcttgtttaaaagcgaagtagcagggccccgtgggacgcgccttggtctgggtaatcacccccacgcccgggtcatccaccttcctctcggtgaccgaggttcagcagcctctgctattgccggccgtctttgccgatggcctgcctccctaatgacttgtttacatatcctacccccagtgggttaggagaagctccggggctgccccgaccctccgagtgcagggtgtttggggaccgggaggctgctggggcctgactccagctgggagggttatgaactgcatcagtgacgagctgcttgaaatatctgttgcatttactcttagtcatagctgagtgtcagctttttaatgaggttcatccagattgagagccacttggactgcgtacttcactgcctgcttttccaaacatgcctgcagaaatgctcattttcgaggtatttttcccaatgggaattcaggccagagtgggcaccacttgaacaatcttagggtgcttcttttccttggcctctggccatggagggtgttagacagttccattaggtggccctttgatagcaagggaagcaaaggctcaggaagaaatggagaagcgtcccccactccctaggggcagaggattagatacatcggtgcatccctcaggctgggctagctttattcctggtggactccagagggcaagaaaattgaattgaacactgggtaggcagattcaagccttagagaccaaggaaaatccatgggttttgcttttagtggtgtgctctttgttttcagtattgacctgaaacaagactcctaaaatgagagatttgctggtatgaacttgggggtttagcagccggcttctacaaaggcttttttcttgccttcgtttctaaagtgtctttcgtcaaaatggctgttagttatagaacatcctagcaaagtttgagcctgttgctgctggaggaaaaggagttagaattgattcaaatgtcttattctgaaagggcctcacatcacttgatagtttaatttcctcctgggaaatttgtgtcttacatttgtcttccccagagctttgtaaaaggcctgaacgcaccagggactagtgggagcccagatgcagagctttagagaagattctggtgtttccagagaggatgaaatgtcagacttgggctaggatatttgtttttcctcctaaggttgcatctactttaaacagaaattctctcctcgccaccatttatctctcccctgcaatgaaagaaaccatgtttagggccctctcccccatttaatagccctcacatggatgaactatcccaagaatttggtggggttccactcatagtacatcctgtcttcaagagcaaggttttctagattatgtgcagcagttcgtgtttcacttgttgctttttttttttttttttttttttgagatagtctcgctctgtcgcccaggctggagtgctgtggcgctatctcaggtcactgcaacctccgccttccggttgaagcgattctcctgccccagcctccctagtagctgggattgcaagcatgcgccaccatgtccggctaattttttgtgtttttaatagagatggtgtttcaccatgttggccaggctgggcttgaactcctgacctcaagcaatccgctggcctcggcctcccaaaatgctgggattacaggtgtgagccattgtgcctgaccacttattgctaattttttatatgtctcttacttccaaggacatttagacactttttttttttaaagagactcaaaaaattagcatttccattggaccaactaaaatttagcaagctgagctgagtaactttctccatatgtttattaagtacttgccccctgccctctcaacatgtgagtagagaatggtcactttggggaagaaataagtcttattctcatctgaagggattaatgttttggtgttacttcctcaattctgaagaaccaagttgtccagaaattttctcagggttctttggactagagtttggctggttaacaaggggtactacctaattgcttttctctgatattctcagcctctttttctggaggagtatctctgtcagtttcttttcatcagcccttttttttccttcattcacttactcattcatccagttaacaaacatgttggcatctcctgtgtacatgctaggtgccgagggtgttagcaaaggttagggaggcacagaccctgttctgaaggagcctgcagtttcgtggggagagaagagaatgaagaacataaataacaatcatataatatgacctaagtgctatgtgagaggggctagtaatgtggtttgcaaatttggaggaatgaaattctccagctagaaggcccaagaaagtcttatggaagaaacagcttcttaaggtggggttcagagaaaagggaagggctggcctgttgcagaacaaggaatggcatgaagaaagtcttgcacagaggcatggatgttgcttcgagctgtggcgccctatagaaatagaacatgagcagctggtcacagtggctcatgcctgtaatcccagcactttgggaggccaaggcaggcggattgcttgagcccatgagatggagatgagcctggacaacatggtgagaccctgtgtctaccaaaaaatacacaaattagatgagtatgctcgtgcttactggtagtcccggctattcaggaggctgaggtgggaggatcacttgagcctaggaggcagaggctgcaataagctgtgattgcaccactgcattccagcctgggggacagaggaagaccctgtttaaaaaaaaaaaaaaaaaaaaagccaggcacagtggctcatgcctgtaatcccagccctttgggaggccaaggcaggtggatcacctgaggtcaggagttcaagaccagcctggccaacatggtgaaaccctatttctactaaaaataaaaaaattagccgggcttggtggctcatgtctgtaatcccagctacttgggaggcaggagaatcgtttgaacccgggaggcggtggttgagccaagattgcgccactgcaactccagcctgagtgacagagcaagactccatctcaaagaaaaaaagaaaggaagaaagaaatataacattataacatgagttatgtatatgttcagattttctagaagccacattggaaattaagttaaaagaaagaaataggtaaaaaaaatttttttttttgagacggagtctcactttgttgccaggctggagtgcagtggcgcaatctcggctcactgcaacctctgcctcccgggttcaagcaattctcctgcctcagcctcctgagtagctgggactacaggcgcgcgccactgcacgcagctaatttttgtacttttagtagagacggggtttcaccatgttggccaggatggtgtcgacctcttgacctcgtgatttgcccacctcagcctcccaaagtgctgggattacaggcgtgagccaccgcgcctggccaatatttgttttttaattaacttgtttgtttagattttatttaatgtaactatatttccaaaatattatcatttgaacatgtaatcaatatagaaattattgatgagatactttacatttttttcataacaagtttttaagatgcggtgtatactttttacttatagcatatccgttagcaccagccacatttcaagtgtgcagtggccactgtgtgggccacaggtctagaatataagacatgaagatggagagtgagaaatgcctttggaaaggttggaagttcctgtccttctgctgccaattaccaaatctcctgagagtgctattaaggagtgactcaaagcactacacaaagagaattataaatatcttaatattatatctgaaatccaaatgcataattctttacatttggttggtactttagagaggagagaatgggcacagtcacccacaccacccatttgagcctcataatcacctgtgatgtggcttcctctaggtgggaaaccgaggcttagaacggttaagtgactatcccagggtggcaagatcataagtggaagggtgtgaattcatactgtctccagcggacaagaataaaaagacccaggctgggtgtggtggctcatgcctgtaatcccagcactttgggaggccactgtaggtggatctcctgagcccaggagttcattaccagcatgggcaacatggtgagaccccatttttattaaatatacagaaaattagcccagcttctcgggaggctgaggtgggaggatcacttgagtctgggggatggaggttgtagtgagttgagatcgtgccactgcactctagcttgggtgacagagcaacactctgtctcagaaagaataaaaagatttggccatgaattcgtcagctagttttccttacataatttttggacaaggagatctgacattcataggtttttctcttagaagtgggagagcttcaaggtcacgtggtccgtccagcccctgctatctcaccagacactgtccaccctgtatgttggatcagtactccagtgagaagacagcaggcactttcacccatgcagcccattcagtcttcataaccacctgtgatggaggcaaggcaagtatttcagccccctctgatgagtgggaaactgagatgtgccccctctctgctccccaccgaggacctctgcatgcaggcatgaatcccaggagcctagctgatattggagagacggggcggggggaaccagctgcagggtcttggaggaagctgctgtgtacacctgcaaggctgcaggttacatctatctgtcaagcagtgaaggaaggaagttgtttctaagggattggaaaaattcattaattagtagaatgagaaactgaggtgaagcaggaggtggcagggtcccagacagcatgttggactagtggcctgtgtcactgtgttttttgcaggcgggtggcatggggtgtatgctgacttcttattccaggagttggtgccaggaggccaggttttcttaacatccttgttttacagatgtcaaacttgagggccagaggggtaggagaggaagagactttttgtaccttttttgggaaagaacaagagggaagctggcagatgaatttgaagtgcattgaccagggagctgagagagggcggtctgcagccagcccacacctgggaggaggcggcaggcttttctggggacagagtggccaagtcgaagcaagcttaaccatctcaacatgacaccactctttcccattggaacctgagaacttgttcagtattctgacacttagcaagggacctgggttttcttggtcaggtgtgcgtttctgggtgacaggcctgcatcaggtgtattttcgggatgtagtaagttgtggaatatgggtttaggggcatcctctggcaagcactgcttctatcccagctctgggaatgtgccccatgcagtgtcctagatggcccatctgtggtctgcttccaagggtctttcttttagttagttagttttgagacagagtctcactccgtcacccaggctggagtgcagtgatgcaatctcggctcactgcaacctccacctcccaaattcaagcaattctcatgcgttagcctcctgagtagctgggattacaggcgtgcaccaccacacccagctaatttttgtatttttagtagacgaggaatttcaccatgttggccagtctggtctcaactccccacctcaggtgatactcccgcctcagcctcccaaagtcccgggattgtaggtatgagccaacatgccctggcacaagggtctatctttgaccaatggaactgcaaatcaagcctcttttgttaccagagttaccttggatttacccttatctacttggtttggataaattgagtttgcatcagatggagtcaggcttgatcaatcccttatttacttcctcccaccctgttctctaatatccaaaaaccttgaggcactattacatgctagctacatttccttgagtaaagtacttaacctctttgagcctcagtttctccattgcataaaaggaataataaaacttatcccccataagtttatagtgaggaatgaattaattcctcactatagttctaaattaattctacttagggcatccttggtacatagtgggtgttcagtattcatttcattttctcttttctgattcctttcgtaaaagtagaaaaatgaaagagaaatgttgacttctcttttgatttgaaatcattaaaacattttagtaagccttgggagggagctagtggtgtggcatgtgtatcccgctggccaagcacatgtgaacgaagccaagaatccaggggcttttctgccagccagcactgactcacttgcgaggggccctgcctggctcgggggaggcagggctgaagtaccacattagggcatgttccggggaagtagattctctgaataacttggatggctccctggagcatttaggacagaagccacctggaaaatagagatggtcacccccacgtagccttgacagtgcccagaaagtcttgtcacttggtaaatgttaacagctatgatccgttctttaagaccctggggagttttaagttttaccccaccagacctgagaagggtaaagggctgcagattctgttcttttaactggggccagtgtgagccatctttgactcagtgcttgcaatagaccttgattctgcagtgggacctcccaggcccccttgccccccgcaacttctggactcatatccgtcagacatcacttgtcaccttccagcatcagggagaactggatccctcctggctccacactcttaggctctttgtaagtagctggtgagggttttcttctctctgcaagggaggctggtagaactatggatgtgattcgtacaattttagagacaaaaagaaagtacccaggaggtcatttatttcagctgcttcattgcataggtcggggagttgagcatggagtccagcagctactaactagttatctctgtacctggcttccatttactggtccttagcttgttccgtgattcttcattgccccttatttctcaccagagggactggttggccctagatggagtggtctttttaaaattttttttttaaattttttgagacagagtctcactctgtcacctaggctgtagtgcagtgctgcgatctcggctcactgcaacctccgcctcctgagttcaagcaattctcctgtctcagcctcctgagtagctgggattacaggtgtgtaccactatgcccagctaatttttgtatttttagtagagatgggatttcaccatattggccaggttggtcttgaactcctgacctcaaatgatctgcccaccttagcctcccgaagtgctgggattgcaggtgtgagccaccgcacctggcctgggcagagtgaagtcttatgctggggagccatcagcatgctcaaacctcctgcaattgtagcacactttgtaaaactgtttcccacaaaagggcagaactatttgggactttcatgagaccattcactttgtagcacatactactttgaagtttataccttggaaaacctcatgatggtattcccaggcttgcacgtaatctgcactcaaaacatagctgtagaattgaactaaagcatccctctgtccaattaagacctataacctctctttttgagacagaatctcgctctgtcacccaggttggagtgcagtggtgcaatctcagctcactgcatccttcgcctcctggattcaagcgattctcttgccttagcctccgaagtaactgggactacaggtgcgcgccaccacgcctgggtaatttttgtatttttagtagagacggggtttcgccatggccaggctggtctcaaactcctggcctcaagtgatcctcccgcctcagcctcccaaagtgctgggattacagggtgcaccaccacacccagccaggacctatgatctaattcattgttggggtagcttcacaattttcttctggacgccttagtaagtccacactttaagcagccaccacatggcatactttaccttctgtttttcctttcccctcccctacctagaccctcctaacttttggggtttttttcctttcctcagggtcagtttgaaaaggaggatcgagctcactgtggagtatccatggagatgtggagccttgtcaccaacctctaactgcagaactgggatgtggagctggaagtgcctcctcttctgggctgtgctggtcacagccacactctgcaccgctaggccgtccccgaccttgcctgaacaaggtaaggtgctggctgggggcagcctggactcctgggccttgggaacaggatgggctgggagggaggtgatatggttgcaggtgatgtggtcaacagggaaggctccttcccaagtggagcaaagaactcccttcctgtaggagaaactctcaagatacctgggttggttctggtctggttataaacataactgacttcatcagaggttggggtcatgaaggctggtgacatccatttacctgagatgacatgtttgtggggggtaatttatgcttttctctttctgaggaaagaatatctgatgaggaccctagtgtcacactttaacataggtgatgtataaaatgcagctggtggtgcaatggggagagaatgaccttagaatttgcgtgtagaacttgggtcagactacaggggatgttgtaggaggtgagagcttgctaaagacctctgacttccagaaaattgtttcaaggccacatcttcgccaggcatagtgggtcacacatgtaacctcagcactctgggaggctaaggcaagaggatcacttgaggccaggagttcaagatcagcctaggcaatatagcgagaccccatctctacaaaaaaaaaggaaattaactgggtgtgatggtgcacgctgctagtcccagctacttgctactcaggaggctgagacaggaagattgcatgatcctaagagttgaggctgcagtgaattatgattgcactactgcgctccagcctgggtgaaaaaaaggcacatcttctataagggtcagcagtcatggcttcacgcctgcattttcctatccttaactgtgtctcacaggttctgtttgggggcctgccaagcgatttgctttggataggtactgtttgaggggttttgaagtgattgagacccaggaagcataaaggggcatggagacctatggcgtgttggaaattcagagccatcatcggtaacaggaaggacttaccccaccattcttgggatctgtgtgagctgtggaaaggcctcttgggagattataggtacagaataccggtggctttcgcgggactttgaaaactaatgtatgagcatttctgctgccagaggatagtgtggttcgtgactcagtggctggtcacacagagaaggttgacacacagtgggtgaaaggttggaggtgcgcgtgatggggtggctgtgtgcaaaaggctgccactcagctggtcagggactcgtttgaatgatgagtgatgggtgagaatatgtgtcctctggatggagttggggatgaacagggaaagttgtgtgagactttatagaaggtgcagtggctagagcaggcatattcatgttgctgtcagtaacagaaccgaaggcaaggtctgagctggagcacggtggggacccaaagtgggagagactgtgtctgcccacagggagtttatggtcaggagggatgggcaagtacagggataagtaacacaagacagactgtgtttaaaccacccagtgaagttacaaccagaggtggtgggaatgcagaggaagaggggagcagagagcacctgagatgggcttgagttcagaaggggaaaaatgaagggccctccaggttgaacagcatgagtgttcagagacagcatgtatatggtttatggagaacggtttgcctggtgagtaggtagctctgggaaacaacacttggaaaaattggattgagttagcatatggaaggcttaatgccctgctaagaaaactatacttagggccgggcacggtggctcacgcctgtaatcccagcactttgggaggctgaggcgggtggatcacaaggtcaggagttcgagaccatcctgcctaacacggtgaaaccccatctctattaaaaatacaaaaaaattagccgggcgtagtggcaggcgcctgtagtcccagctactccagctccagtctccagctgaggcaggagaatggcgtgaacccgggaggcagagcatgcagtgagctgagatcgcgccactgcactccagcctgggcaacagagtgagactccgtctcaaaaaagaaaaagaaaactatacttaggccaggcgtggattatgctggtaatctcaacattttgggaagccgaggcaggaggattgcttgagccaagaagtttgagaccagcctgggcaacatgatgagaccctgtgtctacaaaaaatagaaaaattagccaggtgtggtggcacatgcttgtagtcccaactattagggaggctgaggtgggaggatcacttgaacctgggaggtagaggttgcagtgagccatgatcacaccgcttcacttcagcctgggtgacagagtgaaactctgtctaaaaaaaaaaaaaaaaaaaaagcaagaaaagaaaactagacttaaatgggtagatgctgggaaacttgaaaagtttttagcaagtagtgacactatcagctttcagaaagttaatttggcagctcagtgtggatggctgggaggaaagagtgaggtgcacctgtgtttgcatcctgctctgccacttgatagctgcattatttacttcaacaaactactcaaacaccatacgtcacagtttgctcatctgtaaaacagggataaataataaagggttaagtggggtaatccagatgaagcacttccatgtaaggtgttaatagttgctattgctgccactgctgctgccagaaggatgaggtcgcaggttattttgagtgtctggctagaggaagtgcaggtactgaccaggatggggactgggagatgatagaggaaggaaaaagtagtaaagacactacagcaatagcatctgtgggtttaagtaggttgggtgtcaactgtgggcaactggagactgagatgagagtgtaaagggagtgagtcagagtgggaggtttgaggggagtttagatttgaatccgccaattgtagacagcgataaaggagtggaagagtagcaaggagctagttgaggtttgagaatgtgaatttataatggagcctaaagtactttcttttttttgcagcccaagaagggagaagtggatctcgggcctggctgcttgtgagccagcccgacgggatgagtataaggaactttagggccagggtgggggtgctagtagaggagggggcttcacggaagctgctggggcagggtggaggctggaacctgggggctgaagatcttgatgaggacaaagtaccggccctgtgaacagaagaaagggagtaagagaggtggatggggctcttaggagccatgtacccaggaagactgacattaaatgaccattttttaaaaatcaacttaattttcaaaggcacattggctcccacctataatcccagtactgtgggaggcagaggcaggaggatcacttgagcccaggagtttaagatcagctgggtttgtttgtttgttggttggttggttttaagagacagagtttcactctgttgcccaggctggaatgcagtggcatgatcttggcttactgcaacctctgcctcccaggttcaagcgattctcctgcctcagcctcctaagtagctggaattacaggtgctcaccactatgcctggctaatttttatatttttagtagagatgggtttcaccaggttggccttgaactcctgacctcaagtgatctgcccacctcggcttcccaaagtgctgggactataggtgtgagccaccacacctggccaaaccaacttaatttaggtataacagtttgggctattgtaataagactgctgtgaaccttcatgtgcaagcctgggtgggcacacattttccttggactgccctggttttgattttggctccacaccttactgactgttggctcttggggaagttcctctttgtgcccttttataaaatatattgataatgaatgtgtgctcataaggtcattgtgaatatcaaataagcatgtctgcagagctcataggacattgcctggtccgtaggccatgagcagtcaatggccgttgtgggtccctttccctgggcctccaggggagacggcacatggcgaggagcatgttgtttcatgggacacagcaacggaaagcccctgcacttggagaacaagccccaggtctctgtttggtggagtaagcccccgtctcagtgtgagtgtggtgctttcacatagcctgtctctcatgagctttgtgacagaacagagaactgctgtgcccaggacattctaaggggagatctggcttcatgctttgtaagctgtaaggaaccttgtaagtgtaaagtatattgcatagtcttgggcctgctgattattaaataataatgctgatattttttaattaattaattaatttatttgagacggagtctcactctgtcgcgaggctggagtgcagtggcgtgatcttggctcactgcaacctccacctcctgggttcaagcgattcttctgcctcagcctcccaagtagctgggattacaggcgcgtgccaccacgcccagctagtttttttgtatatttagtagagacggggtttcaccatgttggccaggatggtctcggtctcctgacctcatgatctgcccacctcggcctcccaaagtgctgggattacaggtgttagccaccatgcctggccaatgctgctgttgtcctaaaaaaaaaatcatagggcgagcacagtggctcacacctgtaatcccagcactataggaggccgatgcaggaggattgcacgagcccgggagttccagaccagcctgggcaacatagcaagaccccatctctaaaaattttaaaaattagctgggtaacgtggcacacatcggcagtcctagctattcaggaggctgagatgggagaattgcttgagagttgcttgagcccaggagttgaggctacagtgagctataatcaagccactgcactccagcctgggtgtcagaaggagaccctgtctttaaaaaaaagaagaaacacattataatctatgtattaagggctttgtccaaaaggtgagagcaaaccacctaaaaccctgttcacactgagttttccccatttaaaaggccttgctgtgattttaagtgtgtgtgtgtgtgtgtgtgtgtgtgtgtgtgtgtgtgtgtgtgtctgtgtgtctgtgtgtctgtcgggagcccctccccactgagcgcagtaccaacgcccctcagtctgcaagtgctcctgagggattggggagggcctggagtttctggctgtccttggaaagttgatttaataagggttccaggaaaaccagcctccctcccctctccctctccttcccctcctttggtttgggatcttacagagcctcagcttgtttcagatcaggctttgagagtggtgagggagttgtttggaaagactgaagccggtttcagatgataagccccaacattctgagcttgcagagggtgcatttgtctgtcttttgcaataagtcaagtcttggtgggcaaagccagtgagtgagtacaacactgcttgcaaggccactgctggtagttggggtgggggtcctgcccccttttcagcagtactgtgggttaaacaccccagtgctcagaaaacctgcagctcagaagtgatttaatgggctgagttttacagctcctcccacccacccagatttgaaggagtctggtggcttgttagaggggggagaggttgcacttaatggaaaaaccacacatttccattctggcctcaagccccctggatgccctgtgtgcaccacaaagcggggctttgtctctgtgttttgcagaaacctgcacctatgggggagaggctgtgcgtggtgccagagccattgcctagcctcagatcatagggcccttgcaggtcctccatccctgggcgtctccagctgcctttggcccaaaggggtgtgcgtttcagcctggctgcagggagagtctcaaataggtactacaggtttggtagtgggacaccctctgttccactatcagacctgtagtctagcatctacactggactgtggtcctgtgtcccaaggctgccttgggacacaggcaagaccctcccctactcccaccccatctccagcatgatttcttatgatgaaaagaacttgtttgcttctcattcaacctggatggtaagaggagtttcttcatcccctgccagaaggcgaatggaattccatggagcaaaaggtgatgtcagatgaccctcttgagaacaagggtggaggatttaggcctctagaaatctgcaaggtgctaagctcataacaggtttccccagaggatcagctctgtcccacttcccctggagaagtggctccagtgcctggaaggggtgtttgcaagtgttcagagctggacagggaggacccagccctcggcctgtgagagaatgtgaggacgctcacgtggccctcttgaccaagctggggcaagcgcagcaaagccactccgaggctgtgttcttggctccggcttctgcattgctacaccattagcttcactgattttccactctggctctgccaggcccgctccctgaagtcagggaggaggaatttctcagggaagaacaaatggctgtccagagatcttgctgccagtgggggaagggagggatcccaaacaaagactctgtcagggtttccatcacctggttcctgtgactacctggagtcgggtcagcaggaactggagagacagcatcagggattctttgggagcctgtggccccagcacggaggggtgtttgctcctggccaggcagaagcagtgagtgatggcttgtgtctgggcggtgatgaatggccctgggagaagtgagtcctggggagtcattatccgggagggcgaggtctggggtcagagagcccgaccagcagctggccctattttcacaatgcctcgttcctccggggccactgggggctccagctcaccctgtagacaccacctttgcctctttcttccttccctgaggcttggaaatgagacaactgtttccctgttgaccggggaagtccagctgctctcattctcctgggctcctgaacggggcggcccaggccttcctcctgggcctggctctttcaccaacttgcaggcaggcaatcccttctccccacccaccatactccccagccccactgcaccctaaataattaagctgaaagctaactgccctacctggatctgaagggcctgggctaaatcccaaactgtttcctcctaggagaagcctgctggagtctgggccacttctgaccttggggtttgctctgacttacagctggtggcagccaagtagcagggccaattgccctaacccctcctccccggtagtgggcctgttgcctcttagcattgccagtgtggcaccaagagacattgaacttctaccctcagagttccctcccttctcctgtttcttggctcacaacagttcttgcctttccacttgccaaacaggtatctactgccttcatgtaaagcatttgtgccctgcaaactaggggctgtggggtgagggctccgtgtagctggtttcaggcactgagaaagatccaccctggcagagcttgaaactccacgccctctcctcgttcacatgctgtggcgtggctgagcctcccgggatgggttgtgtaaaaggtggggtgggggctgtgccatttgtgttcccaggccctggacatggagacacagggagcctgaagtgggtgagagggtcaaggagttccgcaaagagtagacttagtggttacgaggttgggcagagaaagaggtcagaaacagcaacacggaggtttctaggagttaaccaacagtgaacattgaattcagagcttagcccttcctcacttttctctaggatcaaaaactagcttctggctaatggtccattcattgactgattttttttcactcattcatttattcattcatctagtcaagcaagtctcttcctttttccgtaaatacaatgtatactttatacattgttttatcctagtcccttagctggaaatatctgttcctgtccttttcttccttttcactttttataattcctgctcaaatcttagtttaaggtttagcttgggtttagattaaagcttaacttaagggccacctcccttttgaagccttcccctatctccaaattaattaccccattttttctctttttcttttttctgtgttttttttttctcctgagacctagtctcgctctgttgcccaggctagagtgcagtggagtgatcatggctcactgcagcctcgacctcctgggatcaagcgatcctctggcctcagcctcctaaagtgttaggattacaggcatgagccaccatgcccttttgagatgtagtctcgcttagtcatccaggctggagtgcagtggcgcgatctcggctcactgcaacctctgcctcccaggtgctagcgattcttctgcctcaccctcccgagaagctgggattacaggcacccaccaccatgcccagctaatttttgtattttttgtagagacaggttttcgccatgttggccagtctggtcttgagctcctgacttcaagtgatccacccgcctcagcctcccaaagtgctgggattacaggcgtgagccaccacacctggcctctttttaactttcattctaacacttactttactctgcctcacattatgtggagtttttaatagatgtctgtttactccactagagcaaagttctctatagtcagcaagtatatctttatcactcttttaaaaacattagtgtttaggctgggcgcggtggctcactcctgtaatcccagcactggccagcctggcgaaaccctgtctctactaaaaatacaaaaattggccaggtgtggtggcacgcacctataatcccatctactcaggtggctgaagcaggagaatcacttgaacccgcgaggcggaagttgcagtgagccgagatcgcaccacttcacttcagcctgggcaaaagagcgaaactccgtctcaaaaaaaaaaaaaaaaaaattggtgttttgttagataatctgggttcatctttcaaaattcagaaaatacagacctgtaaagaggaaaaggaagactcctataattccatcattcaaaagcaatcactgttaactgaatttattgttttagacttttttcttgcatttatgtaaacctgacttttcagaattaggatttatactgtatacgatgttttgtgactgatatcagcatttagagccatacagagaatgtttttcattatgcttaagaactacataatgttccattgtgtgggtgtacaaagttgatccagttctctacatttgggcatttaggttattttcaatagtttgcattcaatagaacatattcttacaaataaaatctgtccatgtatccaaggatagttccatttgttttaagttttgattttatcactattacatcactataccaaatatcccccaaaagattataccagtaaatgtcttttaaaatataataataaataccagccgggtgcagttgctcacacctataatcccagcactttgggaggccgaggcaggcagatcacttaaggtcaggagtttgagaccagccttggtaacatggcaaaacccttctctactaaaaatacaaaaattagccggtcatgatggcggccacctgtagtcccagctactcaggaggctgaggcaggagaatagcttgaacccaggaggtggaggttgcagtgagctgagattgcaccactgcactccatcctgggcgacagagcaacgctctgtctcaaaagtaataataataaatatcatctccacactctgcatgcttgacattttcccatttttacaatgattccataggcataggttttatgaccataatcagatgagtaaactgaggtttgaggggttaagtaacctatcttaagtttatatagtgggtgaggggtggaactaggatttaaactcaggtggttctgctatagtatttttttcccattgtattacactatttttctatatcaaattgggtttccccacaaaatctaggtggaccaacttctgaatgtaaacattgctggctcagtcccctttgtctcacaggagtcaggcatcccctccctttgtcaggggtgtgtgtgtgtgtgtgtgtgtgtgtgtgtgtgtgtgtgtgtgtgtgtgtgtgtttgcttgcagtaatatctcctgtggcattctgtagagaggttacacatcagtcacaggtctgtgaactgccttaatgaacaaggttccctagcctagaataatcaatggaacaaaatccccatggacgctgccatttccactgttgccaaagacctacatggagaaggttcccaaggtgtcagatccgacacctgagttttctttataggtcacagttagcctagaatgtgtggtatgggtattgcctggacgcataaactagattgcttctaatatggatgtggtccaacaatctctgatgaatggaagtaaacatatcaaaagcttcagaggctgggacattaacatttttttgaggctactagtgttttttataaataatgaagaagggccaggcgcagtggctcacacctgtaatcccagcactttgggaggccgaggtgggcagatagagtgagctcagaagacccgcttgggcaacatggcataaaccccatctctacaaaaaatacaaaaaattacctgggcgtggtggtgggcgcctgtaatcccagctactcgggaggctaaggtaggaggatcacctaggcctggtgtggtgggtcacacctgtaatcctagcacttttgggggccaaggtgggctgattgcctgagctcaggagttcgagaccagcctgggcaacacggtgaaaccctgtttctactaaaatacaaaaaactagccgggtgtggtggcgggcgcctgtaatcccaagtactcgggaggctgaggcgggagaatcgcttgaaccagggagtcagaggttgcaatgagccgagattgtgccactgcactgcagcctggctacatagcaagacttcctctttaaaaaaaaaaaaaaaaaaaaaaaggtgggagagggctgagtcagtttgccttggaggcatgggggaggagaaggatgtgaacagggaagtgatctaagagcttccctaggaaggaaggacacccttttcctggaatgctctcctgctctgccacagctttcagtcaattatcactgcctttagaatgcttatcagcactccagcccttcagaagtgtccttctcctcctctggtgtcaaactccagagtttacttttggaattaaggtttattttccttaggttttaggaagtagcttttgaaccttagaagagtcagtttcctttactaactactgaatgaagttaggcattcaaaacttgggtagtcatgatttgaagtgtcacttgcggccaggcacagtggctcacctgtaatcccagcattttgggaggttgaggcgggcagatcacctgaagtcaggagttcaagcccagcctggccaacatagtgtctctactaaaaatattaaaaaaaaaaaaaaataaccgggcgtgatggcaggcgcctgtaatcccagctactctggaggctgagacaggagaagcacttgaatccaggaggcggaggttgcagtgagccaagattgcaccattgcactccagcctgggcaacagagtgagactccgttccccaaaaaatgaaatgtcaatttcattgagactgtatgaatgcctgacatgcacttgaaagtgatgtttattttataattttagcccttcttcactaccccaaactcccagtgcatttaaaaaatttattggcctagccattctcatggggtaatatatcatgaccatcaaaagatgacactaaagtgaatcctccatgtatagctgggctttctgccagccttagattctggagaagcaccccaggccagggagaacgggtgaagaggagaagcatttattgaaggtgctggtagccggagccctgagaccaacacagaatcgttttttctgaaggacaactcaaggacagttgagggctcttcacttccctcacatcagagggagctttgtgctcacgatgggcacggaaagggatgccagtaagcgatgcccctctatcatctcacaagacccaggtgaaacaggacattggttagggctgggacagggtcagtcagccttctcattttacagtggaggaagctgaggcttgagaggggaggtgacttgcctgaggtcacacagtaagtgatcagctgtcatctgagtgatttcttcaggtactctctctggctggacccagccagtgacaactacctgtggctcaagctgagtttgggactaaatggttttacaaggacctcaaagtatactctctctcttctagtaggacatggggaatactgactttgctgagagtaagggctcttttcccaggattgttctagatccccagatcactggaaccctgagcatagatactaggctttagcttcctggctaccacagagccacacactctcaggtagaaaaatccctaaactggctgggcatggtggctcatgccagtaatcccagcacttttggaggcccaggcaggtggatcacctgacgtcaggagttcaagaccagcctggccaacatggtaaaaccctgtctctacaaaaaaaaaaaaaaaatttagccacgcgtggtggcaagtgcctatactcccagctgcttggggggctgaggtggggggatcacttgagccagggaggtggaggctgcagtgagctgaaatcatggcactgttctttagcctgggctacagaatgagaccctgtctcaaagaaaaaaaaaaaaaaacccgaaccatgtttttaatttcttaaaactgagagtactaaatgctcaacgttcatgttgtgtgcataaaagtgagactgaaggatgaatgtgtggggtatggatagatgggatgtgaatgaagcagtctctgggtccaagctctcctggaaattcgtggaacagaccagtggtcccagatttttagatttcataggccagtaaaatttccctccagatttttggaaccaacaaaggatcatcaacttttttgccaagtaagaacgtttttaataaactaatgctgcctgctaccattaccacctgattcttttttttttttttttttttttttttgagacagtttcattcttgttgcccaggctggggtgcaatggtgcgatctcagctcactgcaacctccacctcctgagttcacgcagttctcctgcctcagcctcctgagtaggtgggattacaggcattcgccaccacacctggctcattttgtatttttagtagacacggggtttctccatgttggtcaggctggtctcgaactcctgacctcatgtgatccgcccacctcagcttcccaaagtgctgggtttacaggcgtgagccaccgagcccagcgccatctaattcttttgttgtggtaaaatatatgtaacataaaattaaccattttaactatttttatttttttaagttaaattgattatgtaatgtttttgagacagggtcacactttgtcacccaggctggagtgcagtgttgctatctcagctcactgcagcctcgacctcccgggctcaagagatcctcccacctcagcctcccaagtagctgggaccacaggtgcacgctaccatgcctggctaattttgtttttcttttttttttttttttgtagagatgaggtctcactttgttgctcaggctgatctctaacccctggactcaaacaatcctctcacctcagcctcccgaagtattggagttaagagatgtgagccactgtgcccggccaatttttaaatttgtaattgatgcataatggttatgtataatcgtcgggtacggtatgatgttttgatccacgcacacattatgtaacgaccaaatcatggtaattgctgtattgtatccatcactttaaatatttatcatttctttgtggtgcattttcaccaattttaagtgcacagttttgtagcataaaatttattcacgctgtgtagccatcaccaccatccatttcaccttccctgacaccttacctgttcaacgctaactcccccttctcccctcttccagccccttggtaaccactattctacagcttttcattttcaaaggatgttttattgtctttagtctcatcgtgtgaaaccttaagagaatttctttacggtggagaaaaagtaactttatgaagcccattcctttctctactctggagaggctggtgacccagccccaccattgcaggaatgagacgggattgcggggatatggcaggcacttggggtgctgagagtccaggtgaactgtgagctcaagcacccatgtcgggcttgggggaccagaagacacatcctgaaacagctgaagcctctactaattcatcagcaagtttagggagcggcaacttttccctgcccagctgctggcgtttccttccccatacaatttctgctgagtttgggggaggggaggttgttcgagaggccccagctgggagaggtggggggagggcgatacattcttttccttaaggaacctgaccgaactttaaggtcagagctcagtggagagtgggagctgcagggttacctctttgccgttgattcatctctccaccctcccccactcttaatgatctttccattacagaacccagaccaggaagtgcatgacaggtcgcagctgcagacacatggctgggaggcctgggctccgggccagtggtgggagagtctgagctcccctccagcagtgggacccctgcacacacacacacacacacacacacacacacaccactttaacaacttggtggaagatgttctttcttatgcactgtcacaggtgatgacgagttggactttgctttgagtttaggatgtgatttatattataataaaggcaggagaagacactccccctgccccggtccaacctgagtgtttagatccccccaacttacagtccacctaagtggtccttaccagatcctgggagctttctattatcgtgcagatgccccaacttcttttcccaaaataggacccacccaatatggccttagaagcttcccagggtatccggggcagttgctagtcacagtcttaatgtctccgaaatagtatgttttcctctctatgtttctattaaaatgtcagccccaaaacatgtttctgggtggaggtctaggtgcaacagcacagcctttgcaaacacagatagacttgggttcaagtcataatagatgagttgagcctctcatttttcagtcttcattggggatggctctttccatttgcaagttgttcaggaaatgttaattgaccctaaactgtgtcctagggggcagttgtcacacaggagtttctgtcttcaccaccagctgtgtccttggcttccttccctgaatctgccaaggctggattctggtgctaaatgtgaaatggtgacacaaacttctaggaactgtgagcttggacggccctcctccatagccgcagggcatctacctttgctcttcttggatgagtgaatgaacttccctctttccagagcaatgctttcttcctgtttagataggagggagagaagcaaagtgtattgggaataggttgagcgaaagagtgtagtaagagttttctgtacagctctgtccttaatgtatcagtaaacaatagggtgagaacttttgctggggagagaggaaggagggaaatttcttttcagacaactcttgggtgcattcctttgttaatcacttaattacagcccttctcccagtgaggtagtgaactccccattgtgagaggtagggaggaggtgggggacactggtgctgattggagaaaggtggcaaaatccctaggggaaaaaagtacagatttgaaggaggcatcagatgaatccgtgcatagaagcttgagccccaaactcagttctcaggctgcgttatcctttacgacacccagagtccctctgtcttttaagatccacacacaactctccaggccaatagctcttggcgcctgcgattcccaagtgggattctacacgtgtcttgctgcccagctcggggggatctgtttttggggggtctcggggcgggtgcagggtcctggctgtggctttggctagtgcaggcggctcggcactaaattacagtgacgaggtgggacgcacaaaaggccgaaatctttttttaataaaaacaaaacaaaactctgggccccaagcccctgggctgctgaatggccatggcttcctgtcaggattagccgggctgcctgggcctgtgtgctcggcctttctcctcaggaaatacctttagtaagccccggtggggtccccatggcaacgcacggggggacctgctggcagaggccattcagtctgccattgtcccccggcccctttgttgtgagctttattgccggccctctggcaaacacagcagtttgcaccgttttgtcaggctgaatgtggagtttttacattttaatgggctcttctggcagtggcccatttgcatgcaaaatgtcccctcttactcttttcactttcttcaatttaaaaaaaaaaaaaaagcccttctccaaatcccctgggtcggggggctggtggacgccattggccctgggtgtcaggccctgctaattgatttggtgctcccggctctctttccacacatacctgtgccccccatttttgcagctctccttctatttggggactccgagagttgagagaaacacatttttggggctctctccacccaaacccttgtaggatggcagctgtgacccgggatttcggtgagatgcttctgcactctggccgggtcctgccagccgaaggtaagttttcagttccatttcaaagccaaaatacgtaataaaaaaacctctgcagagggcccccggagccccgctgcgctgttctgtgctccttttaagttgctttcaaagccaccccgagttcctcccccacccacaattgccccctcatttatctctggggagtttataccaagactgtaaacattcctggaccaccagtttcccccatgttgctgaggagtttagcctttctctcctaattttcttaactcagaaatcaaaaagatggaatagggatgatagaaattgctaccctgagacatcatgctcatggaggatgcctggattttgttgggggccagttatccaagccctaagccctttggagtgtagaacgtagagtaggtaatacaaatacctactgtcagcccagcaccccagcaacatgagtaagtgcaagacacaggcatgaacattttcagctctagggaaaggcacattcatgttggggagaggtggagaatgcagtttggccagtctcagaagagtgagttttaaggcctaggaaagtgatggagatgattgcttgttggagagagagaaggagaaaggcatttaggggaagaaaaggaaaatgaaaggagcagtgaggatattggctccactggggaggtggaactggggtagtggccgaaccaggggtgggagaggacgtggttgagaggctccagaccagctggggctgtcatggagtgttgggggtctggagcagtcaggacttgaaagccgggacccttgtgagccctgtgcagtcctgaggatgtggcccaagggggagggcggaccagctcttttgcctcgtgttcttaatcttctcagtgggtcatcaggggtcatcagctgtaagctgtaatcaacggtgaggggctcgagaagagaaggtgtcaggtgactgctggggattgagctgaggacaggagaggcagggtgctgtctcctgtggcccaggcagagcggcacagacctggagtgggccacccctcatcaccccatgtgctgcgacagtgctggctggactgaaccctggaagagtacctggacacagtggaggggccaggacccagcagatgcagcctctagagcttgtccctgttttgtgactttgggagccatttttccatgtttaaatgggaaggaacacaagtcacctggtcacaaggaagcaggccctatgaaatattaagtgcaatgccaaaacagggcattgttactggtcttgagtctgccacaatcacaatgaacacctcccccattttctcacctgccacatttggacagccgagcctgctggactcgcaggggcaggagagtgcattttataattaaaagcactcaactgtaaggtaatgattgatatgagctatgggcttgaggaaatgagggaaggaggggaggataaggccaaagcaaccaacttcagaatctcacgggaggaggtaggatgcagggggtgccattagacagaatcaaagggctgaaccagaagggcttcctcacctggggaagtcaagacactgtgaagattgaggctgccttgcacagcggtaaagctggactctggatgtatgatgtatgtggattctggagaaccaggctacctgtgtttgaatcccagctctgccacttaacaacctagctgggccatcttggactaatcccaaatctttctgtgccccagtttccccctctgaagataataattcctttttttttttttttttgagacggagtctgggtctgtcacccaggctggagtgcagtggtgtgatttcggttcactgcaacctctgcctcctaggttcaagtgattctcctgcctcagcctcctcagtagctgggattacaggcgtgcatcaccacgcctggctaattttttgtatttttagtagaaatagggtttcaccatgttggccaggctggtctcaaactcctgatctcaggtgatccacccacttcggcctcccaaagtgctaggattacaggcattagccactgcactgggcccgaagataataattctaactcttaaatacttcacaagattctaagttaacacatgctgagaactatgctggtatgtagtaagcctccgcatccataggatagaaatcatagtaggatcaacctcataagtttcctatgaggatgaaatgggagggtctgtgttaaaagctttgtgcagcctatgggatatagtgagcgtgctggaaatattggccagtagtagtattgctgtttactcagatgtttatggatccctagataatatatgggaaggcacatggtaaattacaaagtgctatgcaaatgtgttgttattcttcactgggttcctgttaagttgtggggtttggggatggataacttccagaccagagtggctgctgtgggaccgggctggtgaagcggtatttcaaaatacattttcaggtgtgtttgtccatgtggcatgaatgccctgcattcatagtctctgcagagaggtgtgttccctgggatatctttggtggctctgttctatccctcaacttacaaattgaaatcattatttgttactgttttctcccatgaaccttctgttcctggccagctgtacagcctggcctcatctcccactgcccctcagaccagggtacagccatgcctgtaagcacttcattctcttctgttccccccagacatttcacttctcatctaaatcctctcttttcccttccccgtcattttgtccaacctctgctctcactgctgatacttttctttatgtttcatgacgtcagagcctgtgctagacctgcctgtacttggtcctgacattctccatttgtctcatgttgcagtataaaatcttaatccatattaaggtgctgtgcaaatctgagcacccctgttagggcaagacatatgccttctgggcctttgtttcacccatttctccttgcacagtgacaagggctcccagagtcacctaatggtagctatgttgatgaaagttccctgactcctccttggatttttgagaactggggtctcatcttgtcataagaatagcaaggtttgtatgggtttgggtctctgatggttcccatgactggtggaagacacagatttagaatcaagaattgggaggccgaggtgggtggatcacttaagttcaggagttcaagaccagcctggccaacatggcaaaactccatctctactaaaaatacaaaattagccgggcgtggtggcgcttgtctatagtcccagctactcgggactgaggcacgagaatcacttgaacctgggaggcggaagttgcagtgagccaagatcccagaactgccttctaaatgactgtgggagatttttgtccagtcctgctagaagcaaaatgctgtacctgttggcttgttggaagtacaagcctgcagtatttggggggaaagtaggaagggaagagggattcagtagggcctcattatcattaatcgtgttcctgaacttgaaagcaccatgggaaaatcccctcccacccctgcctctgtcctttctagctgcttccttgaggattatcaaaaagtgtgggtctccggtgggctcctaattccttcttaggggatagagacaccttagagaagcagggtaggtttgatgtatgaatccttgtcactcgcactaaaaggagcactggttgcagcctgcacaaattcccaaggtccacccgccagctgctttgacccaggaacctgcgtggtaatgagatcagcagcctgagttctcgaacgatgttcaaggcaaaccctaaccctgaccttcccactcctgttgatgagaacggtgactccattctattggcatcaaagcataaggccccttttttttcacaatgcactttttttgttgttgttgagacagtgtctctgttgcccaggctggagtgcagtggcaagattatagctcctgcagccttgagttcctgggctcaagggatcctccctcctctgcctcccaagtgcctggggactacaggcatgcaccactatgcctggctaatttttttatttttcgcagagacagggtctcactatgttgccagggctggttttgaactcctggcctcaagcagtcctcccaccttggcctcccaaagggctgggattacaggcatgagccactgcacccagtccgcaatgcactgttaacacatggcacctagagcctgtaatagtgaacagccagtctttttcagcctcaggctaggtcaccagggaatccagataccagatgccctccagcctccattccccacctcatctctcaggaaacagatgcacaaagcaagtgttttggtgctgcttccctcacagcatccccatgtgcattttgaggacaacctttgtatctgattccaattaatcaggttctccaggagttggaatgttggtttcaagtgactgaacaataaagtggctttcttcatctttcttggccagtccaataaaagtgtcaggtagcttttctcttgctaatggacacctaacgacaccctggcctgttggtcttgaccagagaaaggccagctcagggcagctggagctgaagaggcaaggacctttctaatgaggacataagtgagggacactggaaagaccaaaagagaatggaaagtactgacatggtagttgcagggtgctagtgagcagtcatgcccccaaatcagccaccttacatagaactccccaagttcagggccactggatggggttgtgacgcagtcaagcagggcccagaaagcatacaagcagttggtttcatctcctgtaagaaagtggcatcatccctgctttgtaaacggagaacctgacacacaccaagagcactcctagccgtggaaaaaagccgctagaacccgaggttagtctgatttttggttcctctgaaaattagcttttgctggatgctagattcagttctggacttactgagtagtctctgggtttttgacattgttaggcactgtgggaaaattataacaggtacgtctgcgctgagttgcttgctaattcctaggagagacttggacattttggacaattaagaagcaatacaggccaggcacggtggctcacgtctgtaatcccagcactttgggaggctgaggcgggtggctcatctgaggtcaggagttcgagaccagcctgaccagcatggtgaaaccccatctctactaaaaatacaaaattagccaggcgtggtggcacatgcctgtaataatcccagctactcgggaggctgaggcaggagaattgcttgaactggggaggcaaaggttgcagtgatccgagatcacgccattgcactccagcctgggcaacaagagtgaaattctgtctcaaaaaaacaaacaaacaaaaagaagcaatacagctctttgagaaagatgcagtcataagtggtgcagagttgcagtctgcccattcctgctcctcactcatcgctgttccgaacaagtcagccaggaagccgcactgcaccaaggcttttaaagataccagaaaacacctgtgaagctggaggtgaccattcaccaaattcgaatccctctaatgatccgcagcgtaaaatccctggagaaggtgtgtgctgacttgattcagaggaggaaaggaaaagaatgtctaagtgaagggaccagtttgaatgcctgccaagactttgagaatcactataagaaaatctccttgtggtgaaggttcagagacatgggatcgtttccagatgagaatccacaagctacccactgacttgcacagtccttctgagattgttaagcagttgacttccatcagtgttgagccaggaattgaggtggaagtcaccattgcagatgctcaaagtcaactattttaataaactgattagcggttgttataaaaaaaaaaaaaaaaagcagcagcaatatgggttgagcgcagcggctcacacctgtaatcccaacactttgggaggtcaaggtgggtgggttgcttgagtccaggagttcaagaccagcctgggcaacatttgaaattttaacttattttttaaaaaagaaagaaacattatacccaatatctgtcaattgatgactgcaatgtggtatgtctacacaattgaatattattaggtcattaaaaggaacaaagtgctgattctatgctataacatggaggaagtttgaacacatgctaagtgaaagaagccagtcacaaaagatcacatattgtatgattccattgatatgaaatatctagaatagccaaatccatagacagaaagcagattagtggttgcttagactggggataggggatggaggagtgactactatgggtcaggcattttttgaggggcgagggatggtaaaaatgttctaaagtgagattgtggtgaatgattgcacaactctgaatatacaaaaaccattaaatggatgaatattacagcatgtgaattacctgtctgctgtttaaataaaatagaaacaatacaaaatggaatgtaattgagtgtgaatttgtgtgattcaggcggtaactgttttacagaaaattagagatgagacattgatataaacaaggcttcctagtttcttgttttgttttaagacagggtctggctgggtgcggtggctcacacctgtaatcccagcacttgctaactgaagatgcaaggaccgaggcgggcagatcacttaaggtctggagttcaaggacagcctggctaacatggtgaaaccccatctctactaaaatgcaaaaataagccagccattgtggcatatgcctgtagtcccagctgctccagaggctgaagtgggaaaatggcttgaacctgggaggcagaagttgcagcaagccaagattgtgccactgcactccagactgggcaacaaagcaactctgtcttaaaaaaaaaaaagggtctttgtcatcccgtccagtggcatgatcatagctcaccgtagcctccaactcctgggctcaagcaatcctgtctcagcccactgagtagctgggactacaggcatgtgccaccaagtctggctagtttttaaatttttttgtagagacgaggtctcactatgttgcctaggctggtcttgaactcctgggctcaaatgagcctcctgcctcagcctccccaagtgctgggattgcaggcataagccactgcacccagcccctggacgttttggatggtggactttgagtagtttggggtaggaggactctggagtggcgctgacagtcctcaggaaggagtaagctttgccatgccagggaggatgcagccgtgctgaaagcatcccaactggggaggggggggggcgcggtggggagggacagcccctggtagagagaatggggctgggtggagagagtggaagccaattgcagggagtcttgaaggtgaggcagggatgtggattttactctgtacacagggtagattttgatcaggaaaataatgtcaagcacatgacagcttggaagcaggagtctgagctgcagccccagggaggccatttaaaagattatcccggctgggcgccatggctcatgccagcactttgggaggccgaggcaggcagatcacgaggtcaggagctttagaccagcctgaccaacattccccttctctactaaaaatacaaaaattagctgggcatggtggcgcatgcctgtaatcccagcaactcaggaggctgaggcaggagaatcacttgaacccgggaggcagaggttgcagtgagccgagatcgcagcacttcactccagcctgggcgaaagagcaaaactccatctcaaaaaaaaaaaaaaaaaaaatttatcccgagatggttccggtaaagggataggacagagcatacctgagccacgtttggaagggaaccggggtctaaacttgcatcaggaggaaagcgagctggttcttgaggcttttacagatcacgtatagtggagttttgtttgcacgttctggttgggacgggcaggaagttacggatccaagctggtatcagctagagcgggtctcaccagggccagtgttcctttgctgcattctcttggggggaaataaatgcctgggggttctctttgctacatttttgtctttgggagctgcttttttctctgggatcggctgcaataggccttgtgatgccagagggtaagaattcaagtttactcttgaccaatgggttgcacagatcacaagctgcaaaatatttaatcaccgaggtcatttgagggaaatgagatttgatcaatagaagtgtctgctctgttccttaagagttgagtctaaactgcttttctccttaccttcgtttggcaaaaccacagaccattaaaaatggaaagaataactttttctaaggcccacaaaagcttatttttaatcagttgtgtggtctactcacctttgtggtgttccccttgaccggactcacaaaaataaacgtgtgcaagcctagtggtttctgagcccttttaaagcagtacccctgtttctgacaactcttatttaagataaagcccatgggtcaatgcaggactgggtctgcaaccttggcccccccaagagaaaccactgtcagtccctgtcagttgctgatcatgatgcgcgggacacccattttcatttttaaggtttctagcggaagcctgttgagcacttgaggaagaccgtgtttcaaataagggggagtgaaagagaaaagggagagtagaaaggaaggcagtgaagagccagagtgactgcacgtgtggtatttattgagcaagcatttcttgagcaactcctgggcgccaggcatcgtagtaggtgctggggatttaaaggtaccgatgacacatcaccgcactcaggttcagaaagaggactgcccttcagtgtgacaggtgccaggagggggagggcacctaacccagactgggagtcagcaccgccctggaggagaagtcaccagctaggctgagacagaagagtgagtagtgagagctggacagaaaaaaatcaggggccctgtggccactggggcagccgtgagccacagcaggggctgagggagaacatgctgtttcagagccttatgcatcggggagcggcagtcgctccactgagtctcttagggtgaacaaatggtgagaaaagtcctctccaaggctgtgggcgggatgtgggtggtaggtgagaggtggaagatgccaggagtacatttgaacatcctaaaaggaaatagaaagttcatttcccctcgtgagtgcagaggggtgtgctcaggagatgggtaacagcccaggatggtgaactcaggtgtgtccgggccacgggccttcttgaacgcgtgcgggaagaggcactggtcaggggagggacaggtgctcttggtggtatcagatcttgtgaggtgcagacaccccggtgggtccagtgctcccacccagggacagagaaggatggggcacggggagggagagtggatggtggggggcctgagggtgtgcccagtcagagggctgaggagaaaggacctttgtgtgcgacagctcctgctgccagagcaagtgtgggttttatggcagctgtggcctcccgtcctaatatagtcaacagctccaaatcccctgccctgacacctgttagcgagaggttccctgagctgacctctccttgggctgcccccccagcatgtgcatctgacgcgtcgagggccagacccccaccctctccgaatcacacgcatcctggtcagcccccagttgacaaattgccttctctcgacttgggcaggggctgctggggttttgaggggcggggtttgttcagctgttgctagggaagggtgaggctgagctatcccaaaggaaatggggtgttcctctggcaagtggcaatcttggcaaagaactgagcatctggggagggggcaactccggacacaaagaagtcctggggagggccgacctttccccttaggatgggggaaatgaaatgtgatccgcttaatgctgctacagctgcttcctaactttgcctctttcttcctttgacttttggaggagtggggtggaaaagagatgggggttcccaggcagccagctgttttccccactgacccatgctccaattcccactgccctggctcagtagcctccagtaagtgatgcccaggatggtgcggctccgtgtggccagcgtaattccctttgtctctcccctcctcccctctccctgtcttcctctctcgccccttggcttcccttcccggccccgtggtggctgcagcccagccctggggagcccctgtggaagtggagtccttcctggtccaccccggtgacctgctgcagcttcgctgtcggctgcgggacgatgtgcagagcatcaactggctgcgggacggggtgcagctggcggaaagcaaccgcacccgcatcacaggggaggaggtggaggtgcaggactccgtgcccgcagactccggcctctatgcttgcgtaaccagcagcccctcgggcagtgacaccacctacttctccgtcaatgtttcaggttggtagccaagccctgcccttgcccctccctagacccaccccctccagccctctctgccagtttcagaggaaggtgaacctcctccccctccgtgatctgcccccactctgcttcagaaactgctgcccactaacattgctccctgcctgccgcgtggcttggctctcagagaggtgactaggtggggtgggccccagggccggagatctggggcttccaggacacacctcggaggtgattgccagggctcttgggatgttaagaccctgtgatttttttccaccacagcttgcccagatctccaggaggctaagtggtgctcggccagcttccactccatcactcccttgccatttggacttggtactcggcttagtgattagaggccctgaacaggtggtggtatccctgctctgctggagaggaacccaggtgcaccgcaagggagctgtgcgagggcagccagggagccctggagctctgtgaacttgggaacttgccactcttagaatgtgactttcacaaaactaggagttgaggaagtggagctgaaattttctttatgccatttatgcacctcagggtgtggacttggcagcagatccccaaaggtgataggaaggactggagaaagatctggcatgaaccctgatgggtgaccacatgtgtatcaagcgtgttcttacaagaaataaatacttattggggagaggtgttggcagctgctggggtggtgggtgccctatctgctctgattaaggagggcagcccccaaaccttagtagacacatgctagaaaaattctgactgtggggtgtttagcccatcctttggaaatagcatctagccacagtgtgtctagacctgcctgggtttccctatagtcagccgtccaaagaagaatacaggttgcctggctccagcacacccaggtggcaccacaagttgagaaagcgcctttgaatgtaggacggaattaagttaaataggaacagctgaccctgatggaaccacccagtgtgaaggcttccaggcagtgggggcagtgcttcggggaaggaagcaaacacgcacaggaactgttcttaaacagtttccatcccaccaagagatcatcactaagggagcagtgggactgggatccccatggggagggtgtccgtgttcatctggaactgcactagccttggtgaaatctaggggtccctaggaggaacctcagtgccccttcttcttcccatagatgctctcccctcctcggaggatgatgatgatgatgatgactcctcttcagaggagaaagaaacagataacaccaaaccaaaccgtatgcgtgagacactgtttcctatcttactgccctttgggtctgggcattgggtttaagaggggaggggaaggctgaaaggggaggaagaggagggcacatggggtcacggtgcctgttctgctaagtgccaggcactgctcacaggtgttgggcagatgggcaagacacctccaggtcctggcctgggccctgctcctgagcctgaccagctgctcctctccaccctgcctgtctctcttggctttccccgggcagccgtagctccatattggacatccccagaaaagatggaaaagaaattgcatgcagtgccggctgccaagacagtgaagttcaaatgcccttccagtgggaccccaaaccccacactgcgctggttgaaaaatggcaaagaattcaaacctgaccacagaattggaggctacaaggtacgtgtgtgtgcatgcgaaagttagagtaatgggaacaggggaggccgagttaggaagtcctgattacatgcttttcatttttttaagtaatactttccacctatacaggttattcattaaaatttttaaatacaaaaaaatgcaaataaagtttaaacatttcttcagtcttctttctgtaatatggtttttacatagttgatcacatcatgtatgtaatttccttgccttgtcatttgttaacatgagtcttttcctgatatatttcaagcatgaatatttgaaacataatttttcatgactgtataagattccattattttaaaatcccataatttggctgggcatggtggctcacgcctaaaatcctatcactttgggaggccgaggtgggcggattgcctgagctcaggagttcgagaccagcctgggcaacatggcgaaacctcctctgtactaaaaatacaaaaaattagccatgtgtggtggcaggctcctgtaatcccagctactggggaggctgaagcaggagattgcttgaacccaggagacagaggttgcagtgagctgagatcacgtcatttcactctagcctgggtgacagagtgagactctgtctccaaaaaacaacagaaaaagtcctataatttaatgaactattttgtgatattaggtattttctggtttttcaccataataaataatgttgcagtgaatctctgtcagcatttttttaagcgtgcttccttaggacagattgttacaagtgaaattactaacttaaagggtgtaagcattttttttttttttttagacggagtctcactctgtcacccaggctggagtgcagtggtgccatcttggctcactgcaagctccacctcccaggttcatgccattctcctgcctcagcctcccgagtacctgggatgtgcagccaccattcccagctaatttttgtatttttagtagagacggggtttccccatgttggccaggctggtcttgaactcatgacctcaagtgatctgtccgcctgggcctcccaaagagctgggattacaggcttgagccaccgcacccagccagaaatattttaaattaattcaccatgcactcactacatgcaagacaccatgctttaaatgctgcaagatagcgttcctgcccataaaaattttgcagtctgataggaggcaaatgtccatgagcagctaccgtaaaaagtagactgtgatcagtgctttggtaggcagagaggaaagggtgagcacagttctgaccagagactggactggaggagatggtttttgaaatgagctgtcaaggacagtgggggctggattcttagtgtaataggagaggtgcacagttgggaacattcttggtgtatttgggagtgtttgcagaaggcacatctgtccggatcacgaatgatcttgaacgtcacagtggagacttctggagtctttacaccccatctgccagcttgcagagtgtgaacgggctggtaggggggcaatccacgccttgtcctagccaaccctgcagcctggggccctgtgccaccaggctctgatatggagggcaggtgccacggggtgccgacattgtcatggggcctgcattttcctctggaccctcaatgtatccctttggcatttcccctcaggtccgttatgccacctggagcatcataatggactctgtggtgccctctgacaagggcaactacacctgcattgtggagaatgagtacggcagcatcaaccacacataccagctggatgtcgtgggtaagagggcagaggcagcaggaggaatgagtttagtgggaagagccaggcttggagaacacagccggggtgtccaggtttcttaggggcagagtcaggatagcgattggcacttcttggctttgtcaccttgagcaggtcacttctcccttttgagcctcacttttcttatctgtaaaatagagttaagatcagacagtaacacggtcaaagctggttgtcactgtgaaattgaaggtgctgttcagagtctgtcctgaaggaggcgttgttggagaggtgttaaatgtagcgtaataggagctgtcgcttaatgctagcaagatgccaggctccttaaatacctgccctgtaatgctcatggcacacctgcaaggtgggcagtattagtctagccctgcacaggagcacaggcgcataggctcagagaggtcagacaccttgctaatgcagaactgcacacctgtgccaacttcagggcatcacaggagactctgggaagaacattgagcctcttggagctattaccgcaaccttttccttctaggagttctgaaactcactccctagagatcattgggtacagaatctctcagccagtgttcttcttgattatgatgatatggtctaagaaggagattgtggccaggagcagtggcttatgagctccaggtggcatgatgggattactcacgcctgtgatcccatcactttaggaggccaaggctggaggattgcttgaggccaggagtgtgagaccagcctgggcaacacagtgagaccctgtctctataaaaaaatttaaaaattagcctagtgcagtgtcatgtacttgtagtaccagctgagttaactgaggctactgaggtgggaagatcacttgagcccaggaattcgaagctgcagtgagctatgatgacacccttgtgctccagcatgggtgacagagtgagaccctgcctttaaaaaaaaaaaaggtaaaaaggagattctgatccaagaggttggggtaagatctgagattccgcgtttctaacaagctcctaggggatgctggtagcactgctcgtggaccacactttgaatagcaggagtcaaagtgactctggttttttaaggaggagcaggttgtgctgaggtctgggggtgcaactgaattagaaggttctccattaaagcatgagcgacttactgtgactgtaaatatgatgactgccttggggaggaggatcctgatggcttagggcctgaagagagggtgtccctttccccagctctgttttgagaggcttgggctcagcagaagtgctgggaggtttacaacccatcactgggaaagccaagtggggcgcaggtgagcccacccctctttagccatggcaaggtccccatgacaagtgcctcctctcccatcttccacagagcggtcccctcaccggcccatcctgcaagcagggttgcccgccaacaaaacagtggccctgggtagcaacgtggagttcatgtgtaaggtgtacagtgacccgcagccgcacatccagtggctaaagcacatcgaggtgaatgggagcaagattggcccagacaacctgccttatgtccagatcttgaaggtaatcatggcaccagtcttcgtgggccagtctactgggaaggagaccactgtctcgggggctcaagttcctgtgggcaggctcagttgcccccgaatgggatcattcctcacgcttcaggcacacacactccatctcagtagggatctagccacatcccccaggactagtaacagaggtcacaaagtggaggtgagctgggaacagagggctgcagggatgggtggtgctggtctgtaataagctttgagagcaacgtcactggggctttggggtcagctacacaaggaaggcatttggacccctgccttttcattgcccgaaaccagagcctttccaccaagcgtttcccagtcttagccctgtgtcctgagttacgtacgatctttctggcaaatggggtgcatgataagagcatctcttacgaagagttggaaaaacaaatgccatatataaattctaagccatatgaggacgaggagtaatggcattttcttcctttttcctctcactcccagacattcattgtccctgaatgctccattaatccagggaaggtaattgcctaaatctccagtggatctcgcaacaggaaggaaccagaagctgggaaagttgtttacctctttgtcccagagttagacctcatcctcccctagcttagctgtctcagagatatactggccctcccttctcttctctttgctgctggtgctaaaactgctctgtaggtcattggccactgtctccactcacaacccctgctccagtcctggagggagtgggttaaacacaaatagaacattccatttgaagcagtgattctttttttttttttttttttttaatcaaatgctttggacttttgaagtccacttgttctgtacttgtaaaagggaaagaaggccgggcgcagtggctcacgcctgtaatcccagcactttagatcacttgaggtcaggagtttgagaccagcccggccaacatggtgaaaccccatctctactaaaaatacaaaaattagctgtgcatagtggttggcacctgtagtcccagctactcaggaggctgaggcaagctaactgcttgaacccagaaggcagaggttgcagtgagctgagatcacgccactgcactccagcctgggtgacagagtgagtgagactctgcgttaaaaaaaaaaaaaaaaaaaaaaactaaaagggaaaggtaataaatctcacttaacatctcccttcgctccctgggcctgcctgaaagttacacgggagcaacgtgcgtggccacatctcagctttgcccaactgactggtgtgtcgttggtttgttccagcattcggggattaatagctcggatgcggaggtgctgaccctgttcaatgtgacagaggcccagagcggggagtatgtgtgtaaggtttccaattatattggtgaagctaaccagtctgcgtggctcactgtcaccagacctgtggcaaaaggtaatggggagatggatgggaccctgtgctggggatttgatgtaggccccaagctgctggggcaggcggggaagccagtactggactgtccttgccaccctactgtatttctagtgcccagagccatggaaaaatacccggcctgggaggctggtttggtttggtattgtgttggtgtctgtgggttccctctctgccttctgtgtgttccttggctttgtgtggatccatgtgaggactcacggggacacggttttgctgtgttacaaatggtacttcagactgaagttgtgagtgagtggtgattaagagaaggggccataggccaggcacagtggctcacgcctgtcatcccagcactttgggaggctgaggtgggaggatcgcttgaagccaggagtttgagaccagcctgggcaacatagcaagaccccatctctacaaattaaataaattagccaagtatggtggcgtgtgcctgtagtcccagctagtctgaaggctgaggcaggaggattgcctgagcttaggtcgaggctgcagtgagctatgtttatgccactgcaccccagcctgggttgacagaatggtaccccatctcttaaaaaagagagagaaggggttaggcattcccttgcatactcgcatctgctggctgtgtatgcacatgtgcgtgtgtgtatgcgtgtgcatgtgtgtgtctgcagcccccgccatccctcctgtgttcaccttctggctatctttacctgaaaccaaacagcccctgcccgccggccccatttctccatgccgctcaccgcccgcatgctcggatgggccagtggctgccagcatctggtgaagggtcgtaaccagccatcgtcttctcaggtctgccggagttcttccctcagggtctcaccctcttcctctaacaggttttgctgcctggtggttttcgtttgttccttgttgcaaagaagatgtcagggagcatttcttcctctagtcccccttctttctgtctccttcccttgctctgcgtctcttagaggtctcatgtcctgtgcttgtccattttgcttccgttgtctcttctagactgctggagttaataccaccgacaaagagatggaggtgcttcacttaagaaatgtctcctttgaggacgcaggggagtatacgtgcttggcgggtaactctatcggactctcccatcactctgcatggttgaccgttctggaaggtacacactgtaacttctcctctcgatgtcctgccctcgccacgggcacggggggagcatgcatttccaggcttggggagacacagaggcaggagagctggaagaatgggctcctgcctgcctggtgccacatcctgccccagctttgagggctgaatcctctcagctcagagaagagcttccctagttttgcaggcgcacggaggcctcccacccgtacacctgcctctgctctccccctggccattgcaatgcatgcccgggatctgggtttaccctgcagcccgactcctccagggcaggctccttccgtccttgggtccagcagcctcccccctccgctgggtactgagcatctgaaaagtctcagatagggccctacacctcttctcccttctcaagtgctcagcccaggggtggggcttgctgcttgcaaagagcagcccaccctcctgtactgccatcctattgcctttgaagaaggaggtcagcctggacaggtgaactgagttgccttcagaaaggcctgtctcaggcagccgcagcaggcttcacgatgtccatgtatcctgtttgcctgctgccgtctctcctctcccaagaggggaggtctgcgtgttgagccagggaggaaggagcctgcagcctgctcagggtggtggctggtgactgcggggccagggcttgctgctgtctctcggaatgtcctgcatgtgggtctggctgttcctgctggcactgccctcttctctctcccctcctttcccactctgccctgcttgcccgtcagggtctccggatgcccctgctggaggcagagaagcgttctgtttttatcatcgtccctgtcttggtcctgtccgtgctccccatgtgctcccaatcagttgtcttcgttcctcaacatcagggaaagaaaaaacagcaacacttctccctgtcatcagctctgctgtctccttgtcaggccttgggacgttctctgggctcagtctagggtcgtgcctcatgcctcatgcctctctgggaaggttcccaggggcgccgcctccatggttggctggtgggttttaaaggggaaggttgggaggaggcctgtggaaggaggagggccgtccacacccgtggggcaaagcgtgttccatgaaaccagtgctgtgcgtgctgggatgaaagcctcccagcctctcgtgctgaagggaaaggtggaccgaactggcttagctgctgtggcaatggggtggggggtgagtcctaatcagaaggtgggagaagagaataacaaaatggaactccgccccctgccgccacatttccttaagttttaggagttggggcctatgagtagaatttgaaagaactaccaaaaaagcttatttttggaaattaagtcagctttgcctgtggtttggctaggaataaatatttacctgtgtgcccctacagagatgacacagacccaaagtgggacattgagcaaggcacaggctggttcccctcctgtcctctgtcctcattctgtgagtgccaccatcaccaggtactgtggcctgcagaaataaacgaggcaccaaccctgccctcagggaccccgtgtcttcttagggacagaggactcagaaacatctgtgtccccgcatgttaagtgcatgcacacagtgctgaggctttgcagagaagggccatggctccctgaggagaccaagaaaggcacatagaagtgacttctcagctggcccttgcaggatccctgggtgcctgtacctctccagtccagctgagcaaggaggctcaggaattaatgaagatggggcttgtgtagcacgatggttctaggccatcccttttccatggctcaagtccattgaaggcagcctccaaaatcagggggttgcctgatcctcctagtgccacaatcccagtcctagctagaacttgccatggttcttctccctaaaagttcccaggggacaggagacaggtgttgcttttctaatggagcgggacctcgcatggacggggccctccaagcctgctaacaccctgttcgcactgactcagccctggaagagaggccggcagtgatgacctcgcccctgtacctggagatcatcatctattgcacaggggccttcctcatctcctgcatggtggggtcggtcatcgtctacaagatgaagagtggtaccaagaagagtgacttccacagccagatggctgtgcacaagctggccaagagcatccctctgcgcagacaggtaacagaaagtagatgggggatttgcacactcagcaccacctctctctctgggcctctaatgccctgccctctccattgtccctaatttatagctttgggccttattttctggcttctgggcaaggcacagtggaatatcatgaactaagtgctctagagtctgtttcaagctagtgtagcccgtgaatttcctgcaccctccatatcacactgcaagtcctccggactcctgggacatggattgggaggaagtcctatttggacagaatgtgcagccaatagcatgaatttgaactgtccccaagggctgcttagaagtgcagagatgcagggtagagaagagaactgtttgtattagtccattttcacactgctgagaaagacatacccaagaccgggcaatttacaaaagaaagaggtttaatggactcacagttccacgtggctggggaggcctcacaattgcagaaggcaaaaggcacgtctcacatggcggcagacgagaagagagcttgtacagggaaactcccctttataaaatcatcagatctcgtgagatttattcactatcacaagaacagcacagggaagacctgcccccatgagtcaatgacctcctaccaggtccctcccataacacgtgggaattcaagatgagatttgggtggggacacagccaaaccatctcagccataccatacccttgtcccctgtgtgcccacccttccccacgggaggaaatggtacagatggcacaggtgtgtgcaagaatgaccgttccctcagaagcctgtgctcattctggaaggtgctttgggagttaggaatccataagctaaggcaaagtatttgcaaagagtcaggagaacagagttgttactgcaatgatcagttataaaatgtcaagctggaagaggtgcatttggtctgcttattttaaaggtgagtgaagtccagaaaggccagcttgtggcagaaataggtcagtcctagaagttgggcctcctggcctaccatggtctttggaccactctgtgttgaggaaagaacatcagatacacagacatgtgcctctgccattgttgggaagccctgactaagaatgggaaggagtcaccccgtcccccctccttgctctagggtgaccccactcttccttgcaggtgtctgctgactccagtgcatccatgaactctggggttcttctggttcggccatcacggctctcctccagtgggactcccatgctagcaggggtctctgagtatgagcttcccgaagaccctcgctgggagctgcctcgggacaggtaataatactttgactcccaactttttgaaggcattccttgcttgctattctagtggtggaaggtgtgtatactaacaccttctgggcggtgaaggttcatgaaatgcctgcagaaacattcattccactttctgctcgcagttgggtgaaatacagagaggtggagatggggtgcctctcaaggtttgaacttcaccagccccaacttatgccactctctgtttcccccgaaagactggtcttaggcaaacccctgggagagggctgctttgggcaggtggtgttggcagaggctatcgggctggacaaggacaaacccaaccgtgtgaccaaagtggctgtgaagatgttgaagtgtaagtgatgcttctgtccttgcaaagaaaatcttgtcccattccaagcaaacagcaggcctcgggcccagcagaacagcttctctggtgcctttgctgcccacacctgctccgctgcctgcttggggttacctgggagtggagggggtgttctgcaccttgagattgttctatgacgtcactctgttccttggcgtcaacctgggctgtggtcaggtgtttatcctggatccatcgcttgcaggctttcctcaccacatccctgcccactcactaccacctattgcaacaacggctcccatgagagggaagagaaaacaagtttggatgaagtggggaggagagaatcaagtcccagggaaaagcagcccctcgacacataccccactcccttagcctttatcctgccctcctcccttcccaagtaaatgagtctcaacgtgttctttaaagcggacgcaacagagaaagacttgtcagacctgatctcagaaatggagatgatgaagatgatcgggaagcataagaatatcatcaacctgctgggggcctgcacgcaggatggtgggtgccggccagactggctttccctgcccagcggggagaagatctgagctggggtatcagtcccaaggcctctctcagccacagctagggaagggggttaagagaggctgctttggcagaggtttaaaatgtgttatctcgggatctgggctccgctcattggtgttcattcaggaatacagatacctagattcacacacgtggtgtgttaacagaggcagctgagtaattatggtctaagagcgctcaggctgggtgcagtggctcatgcctgtaatcccagcaatttgggaggccgaggcaggaagatcacttgagatcaggagttcgagaccagtctggtcaaaatggtgaaaccccatctctactaaaaaatacaaaagttagccaggcatggtcacgcatgcctataatcccagctactcaggaggctgacgcataagacttgcttgaacccgggaggtggaggttgcagtgagccaagatcacgccattgtactccagcttgggagatactcccgctgtctcaaaaataaaataaataaataggccaggcacagtggctcacgcctgtaatcccagcaccttgggagggtgaggcgggtggatcacttgaggtcaggagttggagaccagcctggccaacaggtgaaaccccatctctactaaaaatacaaaaagtagccgggcgtggtggcgcatgcctgtaattccagctactcgggaggctgtggcaggagaatcgtttgaacacgggaggcggaggttgcggttagccgagatcgcgccattgcactccagcttgggcaacgagcaaaactccatctcaaaaaaaaaaaaaaaaaaaaaaaaaattagccaggcattgttcatgcctgtaatcccagctgcttgggaggctgaggcaggagaatcacttgaatccagaaggcagaggttgcagtgagccgaaattgcgccactgcactccagcctgggcaacagagtgagactccatctcaaaataaacagacaaactggggctcttaccccaatgttgctcgggaattttctggactatgctgggagtaattatttctctgattttttttgggtagtagaatggatttcccaggtcccctaagaggaggcaggagatgggaggttggccggggtgtgctgctgggggtggggtttctttgaggtgaagccaaacctgctcacctgctgctggccccatggcctcttctcctgtgcctgcaggtcccttgtatgtcatcgtggagtatgcctccaagggcaacctgcgggagtacctgcaggcccggaggcccccagggctggaatactgctacaaccccagccacaacccagaggagcagctctcctccaaggacctggtgtcctgcgcctaccaggtggcccgaggcatggagtatctggcctccaagaaggtgtggaacctgaaggctcccctgggtaatgccagggtgggaacagagcccccctagtcttccagcctgtgacttatcatcttgtggtggcgttgtggatgcactgagcactggccctgtgtgccctgtgtgttgtcttaggctctctgggaactgcagagtcaggagcaccagtgtagccaggtggccttggggtcagactgatgcagggtccgatctgtgcactgccactttctgcgtagcctcaggcagctacttagcatcttaaaattcttcaaatacaaaataataataatatcagctgggtgcagtggccaaggcgggaggattgcttgagctcaggagtgtgagaccaggttgggcaatatattgaaaccccgtctttaaaaaaaaaaaaaaaattaaaaaattagctgggtgtggtagtgcgtgccgatagtcccagctactcgggaggctgaggtgggaggctagcttgagcccaagagtttgaggctgcactgagccatgatcacaccactgcaccccagccggggcgacagagcaaggccctgtctcaaaagaaaataaagtataacaatacctgttgtagaattgttatgaagataaaatgaaactgtctgtgagtgttgagtgcagtgtttggtgtgtaagggctggcctggtttgagcccagccccatgtggacttgctgtgctgggaggcaggacctaggagcatgcatcgctgcagacgcagcagaggcataaggggccagtctttggggaaggaagggaggagcgcttgctgtgatgagaagcctggagctggcagagaatgttagaagagggaaagcaaaggttcggggggcagagcagtgtggcagaagttctatgagacaagtcggctagttgcatgggtggcggccgcccagagccttccagctccctcacctccccgcctcccgctctcccttcctccttcctcagtgcatacaccgagacctggcagccaggaatgtcctggtgacagaggacaatgtgatgaagatagcagactttggcctcgcacgggacattcaccacatcgactactataaaaagacaaccaacgtgagtgccgacaaggccgccctgtgctggtggtttcatctgagaagcaaggagtggggtgggctgagaacccaccccccagtcccttcccacctgtgccctcatggccctgcctggggccactccaacctcccctgtgctgctttcagggccgactgcctgtgaagtggatggcacccgaggcattatttgaccggatctacacccaccagagtgatgtgtgagtttgtaatagcaattgccagggaggtgtgggatagagagcttctagcactgtagagtcctgctttctccctggactgaggagtcctctttctgccccagagagaaaaacaaaacattgtctgtggccattccctctgctccagatgttgaaaggctgatctgttctccatgctgtctcctggcactgccctgggtagaggatttgtgctgggggaggggaggcggagaagctctaacaccctgtggctctccgcccatttgcaggtggtctttcggggtgctcctgtgggagatcttcactctgggcggctccccataccccggtgtgcctgtggaggaacttttcaagctgctgaaggagggtcaccgcatggacaagcccagtaactgcaccaacgagctgtaagcccgaggagatgtcggaggccctgagccaggccttggggcaagagtgggcttgaggggcagggggctagactagagagtatccatctccaggagacgtccctgaccttacagtcctgccgcaggtacatgatgatgcgggactgctggcatgcagtgccctcacagagacccaccttcaagcagctggtggaagacctggaccgcatcgtggccttgacctccaaccaggtaaggctgcccgtgccagagccagagctcaggccgtccccactgcgtgcacgcacctccctgagcagggaggaggggcccggcccatcgctgcttcctctcgcccatcacaggagtacctggacctgtccatgcccctggaccagtactcccccagctttcccgacacccggagctctacgtgctcctcaggggaggattccgtcttctctcatgagccgctgcccgaggagccctgcctgccccgacacccagcccagcttgccaatggcggactcaaacgccgctgactgccacccacacgccctccccagactccaccgtcagctgtaaccctcacccacagcccctgctgggcccaccacctgtccgtccctgtcccctttcctgctggcaggagccggctgcctaccaggggccttcctgtgtggcctgccttcaccccactcagctcacctctccctccacctcctctccacctgctggtgagaggtgcaaagaggcagatctttgctgccagccacttcatcccctcccagatgttggaccaacacccctccctgccaccaggcactgcctggagggcagggagtgggagccaatgaacaggcatgcaagtgagagcttcctgagctttctcctgtcggtttggtctgttttgccttcacccataagcccctcgcactctggtggcaggtgccttgtcctcagggctacagcagtagggaggtcagtgcttcgtgcctcgattgaaggtgacctctgccccagataggtggtgccagtggcttattaattccgatactagtttgctttgctgaccaaatgcctggtaccagaggatggtgaggcgaaggccaggttgggggcagtgttgtggccctggggcccagccccaaactgggggctctgtatatagctatgaagaaaacacaaagtgtataaatctgagtatatatttacatgtctttttaaaagggtcgttaccagagatttacccatcgggtaagatgctcctggtggctgggaggcatcagttgctatatattaaaaacaaaaaagaaaaaaaaggaaaatgtttttaaaaaggtcatatattttttgctacttttgctgttttatttttttaaattatgttctaaacctattttcagtttaggtccctcaataaaaattgctgctgcttcatttatctatgggctgtatgaaaagggtgggaatgtccactggaaagaagggacacccacgggccctggggctaggtctgtcccgagggcaccgcatgctcccggcgcaggttccttgtaacctcttcttcctaggtcctgcacccagacctcacgacgcacctcctgcctctccgctgcttttggaaagtcagaaaaagaagatgtctgcttcgagggcaggaaccccatccatgcagtagaggcgctgggcagagagtcaaggcccagcagccatcgaccatggatggtttcctccaaggaaaccggtggggttgggctggggagggggcacctacctaggaatagccacggggtagagctacagtgattaagaggaaagcaagggcgcggttgctcacgcctgtaatcccagcactttgggacaccgaggtgggcagatcacttcaggtcaggagtttgagaccagcctggccaacttagtgaaaccccatctctactaaaaatgcaaaaattatccaggcatggtggcacacgcctgtaatcccagctccacaggaggctgaggcagaatcccttgaagctgggaggcggaggttgcagtgagccgagattgcgccattgcactccagcctgggcaacagagaaaacaaaaaggaaaacaaatgatgaaggtctgcagaaactgaaacccagacatgtgtctgccccctctatgtgggcatggttttgccagtgcttctaagtgcaggagaacatgtcacctgaggctagttttgcattcaggtccctggcttcgtttcttgttggtatgcctccccagatcgtccttcctgtatccatgtgaccagactgtatttgttgggactgtcgcagatcttggcttcttacagttcttcctgtccaaactccatcctgtccctcaggaacggggggaaaattctccgaatgtttttggttttttggctgcttggaatttacttctgccacctgctggtcatcactgtcctcactaagtggattctggctcccccgtacctcatggctcaaactaccactcctcagtcgctatattaaagcttatattttgctggattactgctaaatacaaaagaaagttcaatatgttttcatttctgtagggaaaatgggattgctgctttaaatttctgagctagggattttttggcagctgcagtgttggcgactattgtaaaattctctttgtttctctctgtaaatagcacctgctaacattacaatttgtatttatgtttaaagaaggcatcatttggtgaacagaactaggaaatgaatttttagctcttaaaagcatttgctttgagaccgcacaggagtgtctttccttgtaaaacagtgatgataatttctgccttggccctaccttgaagcaatgttgtgtgaagggatgaagaatctaaaagtcttcataagtccttgggagaggtgctagaaaaatataaggcactatcataattacagtgatgtccttgctgttactactcaaatcacccacaaatttccccaaagactgcgctagctgtcaaataaaagacagtgaaattgacctgagagaaaatgaaatggccgttttacttagaggaccaaattgggtctcctgaggaaaggaatccagtttatctaatgaagatgttgtgccatgaaggcactgagtctgtctggtttcctgagggttaaaagattagggctgggatcaccacagcattaatcaatactgcctttccgtctcttctaattgccataggctggagatcatcggtcccttggccctgctaatgtaatgtattgatctcaggtaagtaagattgagcatcaaatgaggcaagaaatctgtctcattgttaatgaggttgctgtgc

SEQ ID NO: 8 - protein, 822 aa, Homo sapiens [sequence omitted]

SEQ ID NO: 9 - DNA, 1509 bp, Homo sapiens
  v-erb-b2 erythroblastic leukemia viral oncogene homolog 2, neuro/glioblastoma derived oncogene homolog (avian) (ERBB2)
gggaggggcggggcctccgccaccacctcagctgcggaccgaggcgagatggcggccaccgagggggtcggggaggctgcgcaagggggcgagcccgggcagccggcgcaacccccgccccagccgcacccaccgccgccccagcagcagcacaaggaagagatggcggccgaggctggggaagccgtggcgtcccccatggacgacgggtttgtgagcctggactcgccctcctatgtcctgtacaggcatttccggagagttcttttgaagtcacttcagaaggatctacatgaggaaatgaactacatcactgcaataattgaggagcagcccaaaaactatcaagtttggcatcataggcgagtattagtggaatggctaagagatccatctcaggagcttgaatttattgctgatattcttaatcaggatgcaaagaattatcatgcctggcagcatcgacaatgggttattcaggaatttaaactttgggataatgagctgcagtatgtggaccaacttctgaaagaggatgtgagaaataactctgtctggaaccaaagatacttcgttatttctaacaccactggctacaatgatcgtgctgtattggagagagaagtccaatacactctggaaatgattaaactagtaccacataatgaaagtgcatggaactatttgaaagggattttgcaggatcgtggtctttccaaatatcctaatctgttaaatcaattacttgatttacaaccaagtcatagttccccctacctaattgcctttcttgtggatatctatgaagacatgctagaaaatcagtgtgacaataaggaagacattcttaataaagcattagagttatgtgaaatcctagctaaagaaaaggacactataagaaaggaatattggagatacattggaagatcccttcaaagcaaacacagcacagaaaatgactcaccaacaaatgtacagcaataacaccatccagaagaacttgatggaatgcttttattttttattaagggaccctgcaggagtttcacacgagagtggtccttccctttgcctgtggtgtaaaagtgcatcacacaggtattgctttttaacaagaactgatgctccttgggtgctgctgctactcagactagctctaagtaatgtgattcttctaaagcaaagtcattggatgggaggaggaagaaaaagtcccataaaggaacttttgtagtcttatcaacatataatctaatcccttagcatcagctcctccctcagtggtacatgcgtcaagatttgtagcagtaataactgcaggtcacttgtatgtaatggatgtgaggtagccgaagtttggttcagtaagcagggaatacagtcgttccatcagagctggtctgcacactcacattatcttgctatcactgtaaccaactaatgccaaaagaacggttttgtaataaaattatagctgtatctaaaaacaaaaaaaaaaaaaaaaaa

SEQ ID NO: 10 - protein, 312 aa, Homo sapiens
  v-erb-b2 erythroblastic leukemia viral oncogene homolog 2, neuro/glioblastoma derived oncogene homolog (avian) (ERBB2)
MAATEGVGEAAQGGEPGQPAQPPPQPHPPPPQQQHKEEMAAEAGEAVASPMDDGFVSLDSPSYVLYRHFRRVLLKSLQKDLHEEMNYITAIIEEQPKNYQVWHHRRVLVEWLRDPSQELEFIADILNQDAKNYHAWQHRQWVIQEFKLWDNELQYVDQLLKEDVRNNSVWNQRYFVISNTTGYNDRAVLEREVQYTLEMIKLVPHNESAWNYLKGILQDRGLSKYPNLLNQLLDLQPSHSSPYLIAFLVDIYEDMLENQCDNKEDILNKALELCEILAKEKDTIRKEYWRYIGRSLQSKHSTENDSPTNVQQ

SEQ ID NO: 11 - DNA, 63785 bp, Homo sapiens
  v-erb-b2 erythroblastic leukemia viral oncogene homolog 2, neuro/glioblastoma derived oncogene homolog (avian) (ERBB2), transcript variant 1
agctagcagctgggaagggaaggggaggggaagcgaggggaggggaggggaggggaggggaggggaggaaaaggaaaggaaagaaggaaagaaggaaggaaggaggagagataggaaggaaggaaaagaaggaaaagaaagaaaccaagtagccgggaagggaagggaaggggaggggagtggaggggaggggaggagaggggagggggaaggaaggaaggaaaagagagagagagagaaagaaaaagagaaaggagagggaagaggggagaggggagaaaccgagcagccagcgtgcctagcacagccctggacaccattgacccctatgtttgggttgagatctgtccctgagttaacttcaaccccagggctgtcaggcactgctgctatcaatacctcatttgtccctcacaacaactctggggtggcctcctttctatgactttctatgagcccgcctgtccccctgctattacaatgaagcagatgaaactgctgatctttgttactgatgttttggctgttttcaatttccaaaaaatgacaattaaatgcaattcaacctaatattgcctaaattttaaaagaggaaataggttctcacagtgtttaagtaaccagcccccgtgcctcagaggtagtcaacagcagtatctggattcaaaatccagtttgcctccttctgaacttcttaacatgctacttttagccacggattaagaacccgggaaccagttgctagggtttgagtatcagctcatctacgtagcagccatgtaccttggaaataataataatgcagaccaggtgcagtggctcacagcctgtaatctcaacactttgggaagcccaggcgggtggatcccttgagcccaggagttggagaccagcctgggcaacacagtgagtgagaccccgccaccaggtatggcggccgcgcacctgtagtcaggagaatcacttgagcccaggagttggaggttgcactgagctgtgatcacaccactgcactccagcctgggtgacagagcgagataataataataatgatgatgatgatgcagtattttccaatttacagggttgccctgaggattgaataaggaaatctaagtacagagatttagaacagagccctgcactgtgtaagcactctatagatgtgagctattattatcatcttcaggttcctttggtagtttttttctgcttgaataaaatatagcaacacacacacacacctcctttgtccactaatgtaatcccataaaacggagaaactcagcagtgaggacattctgattccaagcaggaaggagatgaacgatgaacctcaggctgagcgcctcacggtttcctcatgtcaccggggctgggggtgcagtttggcttcacactgctaggtcttttcttgtttttaagggggcaggggctgtcacctctgaggagtcagctgtgattgatccttctccacacccagccaagcaccccccagacaggggagcgcccgcagtagggcggtaggcaagggcagttctagccaacagtccctaaatcatcccagcgggggcgcgggaaattccaccgaggtgaaagcctagggggccgggtgaagaaatccccatacccgggcccagaaaccgctccaggtggaagtaacttgtctaaagagaacagggtgtaacgggggtcatttcagggctgttcttttaaatcggtgagcacggtctgtctactttccctcagttgtctagagaccacacgccacccccgccccgggggagtcgcccggtcgagggtcccgggacaggcgcagcactcgcagcatccggacctggtctgcctcgcgccgggagcggcctctttaagagcggccgcggccaacgtgctccgtgacgtcagagcaggaagtgtttgaggaagtcgcgccgcgctgcccgcgttaagattcccgcattttaatgttttcaggggggtgtcatagccccgggtttggccgccccagccccgccttccccgccccggggagcccgccccctgccccgcgtccctgccgacaggtgagtccccctcgtgggtgcggcccgggtgccacctgcaggccccgccgccccgctgcctgcaaggcccggaagacccctctgtgccgctgggaagtcgcagcttgcggactggggagcgtttcacttgtgcgggttggagttcgggaagccgggagaaacagctctccctggggtggcttcttgggggtgggtggctttgaggggaacctgcgatttatgggaacattgtaaagaaacacgtgacctcggcgatgctcagaagtaggttctgcccctgccacctcgggcagaaggcgggcaggcccgggcgcccctggtggagtcagctggggatcccctcgctagggcaagggcgtgggcatcgcctccctcggtgactttcttccttgcctgatgccacagcaaccggatgggggagggtgagagggacaaaagtttgccacaaagtttggaccaaccaaacacattggtttctttacaaaataaaaaaccagttgtatttttcttctctcccattcaagagcagtggtatctcttgccttctccatccctttgagctccattttttttcttaatcctaaccttttttccccatcccaaattgcttatagagttagcacgacatcagtatgagctggtcaccttccctgacaacgcagacatgtggggcctgggaaatgaaagagcgccttgggacagggggatttggaaatgtcatccgatggcacaatcaggtaggccctctgtgcagcttggggaggggcggggagccaggccccctcctcactgcctccactttctctgatcctgctgggccaagggctcacctttggctttggtcatcttgggacagtgaatagggggactgggaagagggcttcaggacttctgagctgactccaggttagtggtctccatgctttattgactatgtcacctaaataaatagtaaaataaagttaagctcttagtctctattatatatatatggtaacagtagaatatcatgtactaatatatactgatattatatgttataaaacatatagaaataggaaaatttaaaggatgagactaaataaataatttaaaatattttaattccttgaggccagtagttcaagagcagcctgggcaacatagcaagacctcgtctctacaaaaaaggtttaaaaattaggcagccagctgggcgtggtggcttatacctgtaatctcagcactttgggaggctgaggcaggcggatcacgcagtcaggagatggagaccatcctggctaacactgtgaaaccccatctctactaaaaatacaaagaattagccaggcttggtggcacgtgcctgtagtccccagctacttgggaggctgaggcaggagaatcgcttgaacccatgaggcggaggttgcagtgagccaagattgcgctactgcactccagcctgggtaacagagtgagactccgtctcaaaaaaaaaaaaaaaaaaaaaaccttaggcagccttggtgcgtacctgtagtcccactacattggaggctgatgtgggaggattgcttgtccaggagtttgaggctgtagtgagctatgattgtgccactgcactctagcctaggtgacagagtgagaccttgtttcaaaaccattttttaaaaattattttaaatgtcgggtgcagtggcttacacctgtaatcccagcactttgggaggccgaggcaggaggatcacttgaggtcaggagtttgagaccagcctggccaacatggtgaaacctcatctctactaaaaatacaaaattagctggtgtggtggtgcatgcctgtaacttcagctactcaggaggctgaggcaggagaatcgcttgaacccaggaggcagaggttgcagtgagccgagatagtgtcactgcattccagcctgggtgacagaatgagaccctgtctcaaaaaatatatatatatatatatatttaaaatatttgctaattatgatgtcttcccagtattgcttgcgatactgcacggcaaaaaataagcagatccacatgaaagtgagaattcatttagaatgatgatgaaaatccatatttcaaataattaacatttttttaaattttgtagagatggggtcttgctatgttgcccaggcttgtctcaaactctcatcctcaagcagtcttcccgtctttgcctcccaaaatgtttggattacaggcctgagccatgggacctggcctcagctgaggttttttttttattttttgtagtgatggtggtctcacaatgttgtccaggctcgtctagaactcttggcctcaagtgatcttcctgccttggcctctcaaagtgctgggattacagccatgagtcattgaacctggcctgtttttatttttaattgacacataataattgtacatatttatggggtacagtgtgatattttgatacataatgtgtaatgatcaaatcggggtaattggcgtgttcatcacttgaaacacgtatcctttttgttggaaacagtcaaaattctttcttctggctattttgaaatatacaatatttttttttttccggagacagagtctcgcactgttgcccaggctggagtgcagtggtgtgatcttggctcactgcaacctccgcctcttgagttcaagtgattctcctgcctcagcctcctgagtacctggaattacaggtgtgcaccaccatgccagctaatttttgtatttttagtagaaatggggtttcaccatgtaggccatgccggtctcaaactcctgacctcaggtgatctgcccacctcagccacccaaagtgcttggattacaagcgtgagccactacgtccggcctgaaatatacaataaagttttattcactgtagtcaccctgttgttctttagaatactgtaacttattccacctaaccgtaattttgtacccattaaccagtctctccctatttccctccacaactccccccacccccaccaccctttcctgcctctggtgaccactattctactttctacttctgcgagattagtttgttgttgttgttgttgttgttttgagacggagttttgctcttgtcgcccaggctggagtgcagtggcgcgatcttggctcactgcaacctctgcctcccaggttcaagtgattctcctgccccagcctcccgagttgctgagattacaggtgcctgccaccacacctggctaatttttgtatttttaatagagacggggtttcaccatgttggccaggctggtctcgaactcctgaacttaggtgatccccgccggcgcgcccccccccccccccgccatcccagcctcccaaagtgctgggattacaggtgggaactaccgagcctggacgagatcagtttttttttgtttgtttgttttgttttttgagatggattcttgctctgttgcccaagctggagtgcagtggcacaatcttggctcgctgcaactggtgtctcccaggttcaagcgattctccagcctcagcctcccaagtagctgggattatagccgtgcaccaccacgcctggctaatttttgtatttttagtagagacagggttttaccatgttggccagtctggtctcaaactcctgacttcaggcgatctgcctgcctcggcctcccaaagtactgggattacaggcatgagccactgtgcctggcatttttttttttttaatttttaatttctttggagatagggtctcaatctgtcatccaggctgagtgcagtggtgccatcatggctcactgtagccttgacctcctgggctcaaatgatccttctgcctcggcctcctgagtagctgggactacaggtgtgcgttgccatgcccggctaatttttgattttttgtagataggaggtctgtctgttgcccaggctggtctcgaattcctggacacaagtgatcctcccacctcagcctctcaaagtgctgggattacaggtgtcagccaacagactttacccaactgagatcagttttttattagctcccacggatgagtgagaacatgtggtatttatctccctgggcctggcttaattcccttaatgtaatgccctccaagctcatccatgttgccacagatggcaggatttcattcttttttatggctgaataagagtacattgtgtctgtgtaccacattttctttgttcatttgttcattgatggacatttaggttgattacatattttggctattgtgaatagtgctgcagtaaacgtgagggtgcccatatctctttgataaactgatttcctttcctttggatagatacccagtagtgggattgctggatcatatggtagttctatttatagtttttcttttttttttgagacggagtcttgctctgtcaaccaggctggagtgcagtggcatgatctcagctcactgcaacctccgcctcccgggatcaagcagttctcctgcttcagcctccaagtagctgggattacaggtacatgccaccatacccggctaatttttatgttttcagcagagacggggttttaccatgttggtcaggatggtctcgaattcctgacctcaggtgatccgcctgcctcagcctcccaacctgctgaaattacaggtgtgagccactgcgctagccttgtttgtagtttctcaaggaacctccatactattttccataatggctgtgctaatttacattcccaccaatagtgtatagagttccgctttctccacatccttgccttcatttgttactttttgtctttctgataatagccattttaactgtggtgagatgatatctcattgtggttttgatttgcatttgtctgatgattagtgatattgaacattttatcatatacttgttggccatctgtatgtctgagaaattcctgttcaaatcatttgcccatttgaaaaattggattatttatttttttgctgttgaattgtttgagttccttgcatattcttgatattaatcccttgttggatggatagtttgcaaataatttctcccattccataagttgtctccataggttccataggtttattctgttttttcttttgctgtgcagaagctttttagtttgatgtaatctcatttgtctacttttgcctctgttaactgtacttttgaggtcttatccataaaatcttttcccagaccaatgccctgaagcacttcccgtatgttttcttgtttttttttttttgagacagtctcactctcagctgagacaggtgcgatctcgggtcactgcagcctctatctcctgggttcaagcgattctcctgcctcagcctcctgagtagctgggattacaggcagcgccatcacacccggctaattttttttttttttttttttttttgagacggggtctcgctctgtcgcccaagctggagtgcagtggtgtgatctcgggtcactgcaagctccgcctcccgggttcatgccattctcctgcctcagcctcccaagtagctgggactgctggcgcctgccaccacccccgactaattttttttttgtatttttagtagagatggggtttcactgtgttagccaggacggtctcaatctcctgaccttgtgatccgcctgctcggcctcccaaagtgctgggattacaggcgtgagccaccgcacccggccacgtgtggctaattttttttttttttttttttgcaacggagtcacgctctgttgcccaggctggagtgcagtggcttgatctcggctcactgcaacctctgcctcctgtgttcaagcgattctcctgtctcagcttcccaagtagctgggattacaggcacctgccaccatgcctggctagtttttatatttttagtagacacggggtttcaccatgctggccaggctgttctcaagctcttgacctcaagtgatctgcccaccttggcctcccaaagtgttgggattacaggcatgagtcactaacaggcgcctggcctgttatttatttttaaaaagccaaaagccagcttcctcctcctgccggctgaaccccacacagtctgtctgcacctgcctctccatcattcctccccttggctgcctctgttttgagcgctgagccctcttgccggacaggcctccccctcctccacattcctccaggaccaactctaggccatctcctcctcatatgcgtctgggatggctttgttctgtggcaactggttctcccggtgagttcctctgggctggttcctgtgccgcccttcctgtctgcgtgtggagtaagtcttgtcaggaccctgcattcctggtcagccagggctgggtctggcctttggagttccttcagttctcctgtagcaagtgcctgacgttgtatatgtgctaggtgccccaaatcatccactctgccagtccacaaatatttatcgaatgtctattatgtgtacattggtaattaaagcagacctttggagaagggaaggagccattagtcaactaattataaatgtaagctcctaagtatggtaaagtgtgagttgggagaaggacccagtgcactgagaccttccgttggggtgggatcagtcagtgtcagaggaggttccccaaggaagtgacacttgaactgaggccctagtagaagtcagcttgacagagaaggtgggaggagagttccaggccaagggagaggctcctgaggggcctctgtggagggcaggtgtggcaagtgggcaagactgaaggccagcgtggccggaagggaggatggggcacaagtgcctgggtggctgagggtggacggtgcaagtcagatcctgtggtgttttttgggcagtttcagccgaggaggttttgttttgatggaggagcagtggaacgatgttagagggaggcgctgtgcccatggggacagattgggagggcccaagcagtgggcagcgtgctgggaaaaaatcagctctcggaagaaatgccttgatccatagtgtgcagcagttctcatggagtagctactcccaccagggctgacttcaagccaccagtagtttaatagcccgctccggcctgattcctgagtagttaacaaccagctctcagtgactgctactacagtgtcactggctccgtcccagtgatgcaggcagaccaggtctgaatgttttggagtcgtctaggtgagagatggggagaggtgggcagacttaagagatatttaggcctggtgcagtggctcatgcctgtaatcccagcactttgggagcagaggcaggtggatcacctgaggttgggagttcgagaccagcctgaccaacgtggagaaaccccgtctctactaaaaatacaaaattagccaggcatggtggcgcatgcctgtaataccaactactcaggaggctgaggcaggagaattacttgaacccaggaggtggaggttgcagtgagtcgagatcgtgctactgcactccagcctgggcaacaagagcgaaactctgtctgagaaaaaaaaaaagagagagagagatttaaggggtggaattaacagcgcttagtggtggagtagaggtggaggggagcaggaggagtggagtgcctgcaggtcctcaatgatgcctacccgtgagcccggcccaggccaggaagctctctaccttccttccccgtgggttctccccaagtttgggaaatctctagggctgctttgggtgctgaggagaagtctttgatcattgtccaagttcagaagatgagcgtgtatgttctctgttgggaacccctctgttcacagcctcttaaaagaagcagctgggctatggtggtgttggttccttgactctgatggttttactccacgtaacaacagtgtgcactttcctgacactccatgcactgcatcttgtctgcagaagaaggaatgttgtagttatcacaatagaagttacatgaaaaagcccctaagcatgggtatcctcagtcagagaagtggcctgataatcagaggcatcatttactgagaacctgctatgcgccagcatcaaactaggtatttacgtgctttctctccagccctcacaactctgaaaggaagtactgttgtctttgttcccattttatagttgaggagactgaagcacagtctctgtgactcacccacagacctgagctcgcaagcaaagaggctaggattggaacctgcgtctgttcggaacccaacctcatgctttttccattgtgcctgtggcttctctgtggtgaggactcagggggaggccttggtgttccttaggctctcattgttcaccacagtctaaacctttttgaagcaggaaggggaaaacacttctttattgattttttgttgtttgttttttgagacagggtctccctctgtcacccagactggagtgcagtggctcgatcagggctcactgtagccttgaactcccaggctcaaggagtcctcccacttcagcctcctgagtagctgggactacaggcgtgagacaccacgcctggctaatttttttatttttgtagagatgaggtctttctatgttgcccaggctggtctggaactcctgggctcaagcagtcctcctgccttggcctcccaaagtgctgggatttcaggcatgagccactgtgcttggttgaaaaacacttctttggaggacaaaacacttataagtcttccttgttagacagagaaccccacattgagtgtttcccagggagggagggcagtgaacaagcgagccccaccacaacctgcttcccctgttcttgtggttctcctgccacgcgggcctcaccattccacattgtgtcgggactccctaagacctccagcccaggggtcagcacaaaccacttcccagtaccgtttagataggctgatattttcaatgagacctttgttaaatacaaaggaagaggaggaggagataaccgagtgctcccacctggcagcatgttttgggagtgggggcgggaaacacgatactcagtcacacagacctgggttcagatcctggctctgtcagcgtcttggctgtgggtccccactttttgcatggattatggggattctccaatactgatctcctcagtgctgggtccccaacatggctgggcaggatgtgggtcagctaccttctggaagccacccagggtaccttgtgatatcatcatgttctgtgtacacttggctgtgaggagggccaggaagcgctgcctggggccctgcgggatgctcgttggggtggaggaggcagtgtgtgtactggctgttagaaggcagagtattaacgatcccttctatgaagcagcacggacctgtacttgtccctttatgggacaaggcaaagctttccacagcttatctgtgtgcttggaagccttaaagcctctgctccgttcagtcacttctctagggatttatagagcctgggcccgagctctgtcagggataccaggaaaaaagggtccctgcccttcgtgtgcttactctctgatcacagtgatccagggagcattcagaaatgcattaagtgagtctaaatccaagcaccgaactgcatggataacagtggctgccatttttccagggcatcatgtggcatctgagctgggttccctgtccgcatgatctctcccgaacgctggggaagggaggcttcttggggtgaatggagctttagcaggatctggaaaggaggtacactttcgagggcctggcaagaagacagaagccgactcaggtgggcagagcagcatctccacagggccagaaaaggaagtgaggctgcggtcgtttattcccggctccctgtggtcggatgctgtgtttcattttagctgacatccctggagtggatggagccatccccatcttatggatgaggacccagatgcttgtaccatgggcttctatcgcacctttaccaggcggtgggggagggagttacacctggacctgcttgtctcctgagcccgagtgcctggcttctgtgggtgaggcggcaggccactgtgccccttgggggtctgcactgtagggagtagggtgaagaagtcatggccctcttagcgtagaccaggcgatgctggggcccagggtctgtccagttacctgctgagccaggggtgaaactgcagctggatcccggacctttttggctcccagccctgggtcctcctgcccagtctctctggtcccagccctgcacctcctttctgaagcattcatttcagggggtggggtctgagaaggaggaggaggtttttactaattgcccccatgtccacagtggcctggttggatgcttgccatgataacgggacactgggctttctgcgctaagggtctaaacatggctcttggcctctgtgagtttcccctgagtcgctggaagaggcaaacttgaggaagctgggccccttttgtttctcctgtgactgggtcttcagctcgcatctgccaggcaccttttggtctgaggatgtgctccccctctgccttttttacaccttatgacacacatgcttatatataagttttatgtttacatgcatcaaaggcaaggaattgcaaactctgaggaccttcataatcactacattcaatctggacatacaggggaccctttctccgttttctcaaaatacagaccagttttttgttgttttgtgtgtgtttattttttgagacagggtctcactccagtagtccacgctggagtgcagcagcatgatcacagctcaacgcaggtctcgctctattgcccagccttgacttccgagggtcaggagattctcccacctcagcctcccaagtagctgggactacaggcatctactactatgcctggctagtttttaaaaatatttttagtagagacagagtcttgccatattgcccaggctggtctcaaacccccgggctctagcgatctacctgccttggtctcccaaagtgctgggattataggtgtgagccaccatgcccagccacaaagcagttttaagttttgtccttcacgaggagttcatataccagaagttgggtactgagatggcgcaggcctagtctgggtttccacagaactaagctaagactcagtagattccaggaaaaataaagtaagccatccttcttaccttacatgtgtttgagttccactgctagtgaagaacaaactccctggggtttcagaaccggtgatcgtagcctgcttctgttttaattgaattttgctttctagagcaggtatgtttttagtaacaaagtcattctgtttgcatttctgtttcaaatgaaacattactcatggaaaaactgggaatatttcggaatacttcctagaggcagatgaaggccactgtgttaggaaaagtttaagtatgtctgtatctacgcagaccttcctaggcccagggagttaggatttcgcctcaactctagggcgaagctgagctgtctgtgagtagaaagttagttttggtatctatgcccagttatttcaagacttgttcagtgttcacattgctgagttcagtctttttagtttgcatttggatatttaagaccaatatcaagtcttcagtatcagaatctcctcctgattctgggttgggccaagtgacagctgtgtatcaggtccagtgtttgtgttgggcaaaagactgcaattatccaatttgtagctagacagattacctaaaatcacttaataaactaagtcatctaatctattttttggatctgatgatctgtcctgtttcatttatgataggtagaataatcccccccaaccccaccaagaaatctggatcctaatccctgaacctatgactgggtggggcagcatggcaaagggaaattaaggttgcagatgaaattaagttttctaatcagctgaccttagagattggcctggcttccctgggggtcccagtgtaatcccaagggttcttaaacgtgggagaaggaggcagcagagccagggtcagccgatgcatgtgaggaagatggcgggacatggctgacacacggatgggctaaggggctacgagctgaagaaagtggcgcttctagaagatgcagaaggaaaagtagggaaacagactctcccctagagcctctggatggagcatagccccaccaacatcttagctcagggagacccacatcaggcttcagcagatagaactgcaaggaaataaagtgtgttattttaagccaccaagtttgtggtaatttattacggcagcaatagaaaacaagtgccctcttctgtgtattgaagttacgttgctgcagatttttcagtatcttggtttagtctcagtcattctaaggtaacgaaccataagttacagtctctttggctaaaccattgcttggaatagtgtccatggaaatgttgcagggtggatggaggtggatagatgctcttggcaatggcacctcacgctgcagcggggccatcggtctctgtttgtggaaccctgcgttccccacgtctgagctcctctgcaaactccgcctaactggaggcaagtgtctgtagcagtgtctcagtcggctcagtgctgctatcacagagtagctgagaatgggtaatttataatgattttatttctcatagtcctagaggctatgaagtccaaggtcaaggcatcatcatagggtgaaggcgaaagggcaagagacaaaagggaccaaacttgtccttttataaccatcagtcccacctgggatgcagagccattgtggccgaattgccccttaatactgaggtgatgtcctggcgcagtggctcacacctgtaatcccagcactttgggaggccgagacgggtggatcacgaggtcaggagatggagaccatcgtggctaacatggtgaaaccccatctctactaaaaatacaaaaaattagccgggcgtggtgatgggtgcctgtagtcccagctactagggaggctgaggcaggagaatggcgtgaacccgggaggcggagcttgcagtgagccgaggtcgtgccactgcactccagcctgggcaacaaagcgagactccgtctcaaaaaaaaaaaaaaaataccgaggtgatactgctacaacaggaattggctttcattgaattatggaaaactgtggaacttaagccatagcagatatcgtcaggcagagctgctgtggatgaagctaccacagaactgggcaaaaatgtgtctgagcactgtggggaagtgaaacctgaaagcaaattcacgtcagcctgagaacagaccaggaatcgggaggtacagggaggtgtaacatggtctgcacatcaattaaagaaacgttattcttttttttttttttttttttttgagacagagtctcactctgtcacccaggctggagtgcagtggcacgatctcggttcactgcaacctctgacaccagggttcaagcgattctcctgcctcagtctcccgagtagctaggattacaggcacccaccattgcacccagctaattttttatttttagtagagatggggtttcaccatgttggccaggctggtctcgaactcctgacctcaggtgatccacctgcctgggcctcccaaagtgctgggattacaggcatgagccaccgtggctggccagaaatgttattcttttgacacattccctaattcttgaaaagcttgagatggacttgtgtccaccatggtttgtaccactgtactaatcagtttaatagcaacaaggtggccgggtgcaggggcttaggcctgtaatcccagtgcttagagaggctgaggtaggaggaccacttgaggccaggagtttgagaccagcctgggcaacatagtgagactccgtctctacaaaaataaaataaaaataaaaaaaattagctggacacaatgacacatgcttgtaatcccagctacttgaagctgaggtgggaggatcgcttgagcccaggagttttaggcagcagtgagctatgatcactccactgcactgcagcctgggcaacagagtgagaccctgtctctaaaaagaaaaaatagcaacaggttttacaattgttgagagaggtcagctcttgttcagagagcgcctcagaatctaggccaaagatcagggttctactagacaaagagaatgagaaggatacttagggcagaacctggatgcccatgcctactgccgcagactggactgagggggtctcccatagtcacagacgtaagcctgtggctgcaccatgggtgagccttggaaacagtgctcagggaaagaagcctgtcacaaaaggccacatgatatatgattccatttatatgaaatgtccaggacaggctaatccgtagagacagaaagaggtgggtggttgcctaggactagaggggctcggggagtagggagtggctgctgatgggtgtggagttttgttgtgggatggcagacatgttctaaagtgtgccgtggttttggtctcacaactcttgagtatgccagaaactattgaactgtgtaatttaattggatgaattgtatggtgcatgaattattctcaatagagctgttaaaaaaaagtaggcatgcaaggtcaccatctgatggaaagcttagccaaagtggtattgggctttgatgaaagcagcttctgagagtattttagaagtgttgacagtacctcctttctggcatggagtctgctgttccatttccacctttttttctgaagcttttggttcttggtgtcggtgttaaggattggtttattggtcagtgactcagtggtcttattagacagcttctggtgtatgtggaggtttccatttttccttttcttgctgtgaaggtccttgttcctgcagggatcctggccagtttggtaactgtgagactgaggtggcttgagtgccatgggaacagccacactgggaggccttgccacagtcctctgtgtgtctttttttgtttttgtttttgtttttgttttgaaacagggtcttactctgttgcccagatctcctgcaacctctgcctcttgggcttaagcaatcctcccacctcagcctcctgagtggctaagactacaggtgcatggcaccacacctggctaatttatgcatttttttgtagagatggggttttgccacgttgcccaggctgatctgtgtgtctttttaagtcccattcagtaccatgtctgttgctcacttacaagatttatgattcttttcagtttgcatcttcataaactgagaaaacagaaattggcctaacagggcctctaggacatccttcaagtgagccacagtagagtctggtacaatgctgaaatcttctcctactgctgggtgccctgtgccaccctgcaggtgtggctcttgcccaggtgtgtgtgcgggtagggagtttcgtgctgtaggtacacaggaggtgcaggatgttggtgcaggtcagcttgtttagcagtggcaggatcggctctcaggctggggctccgggagctgctgccttgggcagctgctgccccgcagttgtcttggagacccccccatagccaaaagaggtgacagtggtgcagtggtgactcccttgtggcagctggagtgcccgaggccagagccgctttccctgctgcccgtgccacagcctcagggcctgcccgtctccagtgtccccactcatgcaccagggagaagaggggaggccgccaggagccagtggctcagctcatgattcaccaggtggaggagccaccgctgaggatgctgctggttacctcgatagaggttaaagcccatgaagatggacaagtctataatttaacaaagagaagagaaaacagcctgttactctgcagaaagtaactctttggcatgtgcactgaaggaattacctgttacaggagtatagcagagggtgagaccctcttgagctcggcagaccgtggtgcccatgcacctgtgctggcaagtgtagcagagcagggccaagcgccagggtgggtggggccgtctggctgtagtgtcgtgggaagagtggctggaaatgcagataggagccaatctctgtaggatgttaaacaggagtactcggatgacctgggttccctgctctgcagggttactaatacctgctagaggcttgttttcaagccctgaaagatgggtgtcagtattcccattttacagaagaaactgagtcagaccaagtggtttacccaaggtcacacagctagtaaatggcacagttggaatttgaaccagccagtgtttcatctgctatattatgccatattatgcttgcgttctctctgaaaggacaaaactctcacatgaaacaatgaagacactcaatgtggtgttcactattaggttgaaccacatgcaggtgccatttttgtaggtcaatgtggtcaattatcagcagtgtcccatgggtcagcctaatacagcagcagccggggttcggacagggaaacctctctgcgcaggaatggtcagtagaggtttcatggcggagctgggaatggagcagggccttgaaggctctgtagactctggatggatagaaatgaggtgggagaggctgggtgcggtggctcacgtctgtaatcccagcacattgagagtgcgaggcgggcagatcacttgaggtcaggaattcaagactagcctcaccaacatggtgaaaccccgtctctactaaaaatacaaaaatttgccaggtgtggttgcgcatgcctgtaatcccagctactcaggaggctgaggcacaagaatcacttgaacacgggaggtggagtttgcagtgagctgagattgtgccagtgcacttcagcttgggcgacagagcaagactccatctcaaacaaaaaaaaaaaaagagagagaaagaaatgaggctggagaggttgggtgagaggtggagtggtaaggagacagcccaaagggcaggtgctacgtggctgtcgatcagggtgtacatgtgaccttggagcaccaggaggtgattgcaggtaacgcttggggcctggagacccctcccatgcagcagacagggtgggatttggcctgcagctcgctctgctggtccccactgtgctgtttctgtaggaaacaggtgagcagattgccatcaagcagtgccggcaggagctcagcccccggaaccgagagcggtggtgcctggagatccagatcatgagaaggtgagggcctcgcgcatagggacccaagggaaagctggagcagcagcccccggtgtgtctagaaaggagagtcttgctgggtgcgtggctcacgcctgtaatcctagcactttggaaggccaaggcgggcagatcacgaggtcaggagactgagaccatcctggctaacatggtgaaaccccgtctctactaaaaatacaaaaaattagccgggcatgggtgggcgcctgtagtcccagctacagagaacaccagggaagggggaagggcatgctgcacactctgctgggattactccaatgacaaggaaaccccgtctctactaaaaatacaaaaaattagccgggcatggtggcgggcgctgtagtctcagccgctcgggtggctgaggcaggagaatggcgtgaacccaggaggcggagcttgcagtgagccgagatcaagccactgcactccagcctgggcaacagagcgagactccgtctaaaaaaaagagaagagagtcttaaatatctgcccctccatcagggcgccagcctggcagtctccacggtgactctgctgcttctaaagacaccagaggaagagcagctaaagtccacactgggccttgtcaagggctgttcatcaatttcattgtattaaataagttaacacagttatcacagtgacttttcttttgtcagcaaaaaaagccttctttcctcctatatttccagttccaaggtggtatgtgaccgttctctgctgtcatgctgtcgctgacatttattcctctagtgtggagacggggctgtccatctgcctggtggctgctgaccccctagctagtgaggcgtgaggtgggctccgaaagagccagtgaggaggacaccaagcaggggctcctctgccagcctcttaaaaagaggaggtgctatttggttatgtcatggttccatttggttacatgagttccttctcagacccttctctgtgtgtccaccttggggtgatgtgtgtgcgtgaaccaacctgccgaaaattaaacagacaaaagaaaaaaaatatgaaaacaaaaagagcaggcaccaccttgtttgcctgcttgcgtgtgtgacacatcctccccatgtggagggcatgagattgaaaggtccttgtaggagcagtttggcagcacgatgaggacttgggatgtggcacgcacaaaaaactgaagttacacgcagttgtgccctcagggtctgagttctggtgctgtgagtggggctgggtgagcgccactgacccaggcattgcggttggccacccgtcctgggctctgtcttcctctgtttcaaagccctgggttatcctgggcctttgttgctgagacctggtgggggtggtggggatgggtctgggcaggagcctgggtctgctctcatcggttttcctcctcctaggctgacccaccccaatgtggtggctgcccgagatgtccctgaggggatgcagaacttggcgcccaatgacctgcccctgctggccatggagtactgccaaggaggagatctccggaaggtgaggctcccacggctgccaggtgcacagcctgtctgggcaggtgggacaccaggaagagggatggggagacctttcacttctgtcatcatcaggaagcttggggagccccagtgactccagcagggctgctttgcctctcagatcctctgttccctgcccacctggggctggtgtgtgtgtgagtcagaggcgcttccgagaacaccagggaaggggtaagggcgtgctgcacactctgctgggattactccaatgacaaggaaaactcatcacaggtctgggcgtggggaaggactgggcaagttccaaaacaaatgcttcctccctgggcatgttagggccacgttaggcctttggtgccagtgccactgctctccttattaggagggattttattctagagatgggacagcaccacacacgggggcagggagcatagcagagagggagcaggattcatgatcagagagccgggccagggctgcagacccgccccaatccatccgatccacctgacccacctggactcatctgtggggctctattctccaccttctcaccacaccacctcctcttccctagaatgttcacttctggtgggtggatggcagcccctcctggtctcaggggcagttgggtgccctcctccccattgttccctatgacagtaccacacagcctgcctagtacatgttacctcattcgatttccaaaagctcacacatgggtgcacaggtatggttcccacatgatgggtggatgtcatggcccagagaggttgggcctcacacagctgtagcagcagagcctgggtcccagcccacacagacccagctgcaggccacctctccatctctgaggctgaataaggccatataacattatgaaaactggaagctctgaacaaaataatttttttttttgagacaagagtctcgctgtattgcccaggctggagtgcagtggcgtgatctcggctcactgtaacctccatctcctgggtccacgtgattctcctgcctcaccctcccgagtagctgggattataggcgcccgcccccacgcctggctaatttttgtatttttagtagaggcagggtttcgccacatcagccaggctggtctccaactcctgacttcaaatgatcacccacctcaggctcccaaagtgctgggattacaggtgtgagccactgcgcccagccaacaacaatttttattttaattgaaaaagaggtcggttgctctgcgagtgcacctcttcactccagaagggtcacaatagtgggggcgggagcccaggcgtttattcctgttcagtggccattcccagacacacttcaggtgctgttctcactgttcctccaggcccttgtgcctcttaaaaaaaaatttttttttccactttggaaagctgagacaggagaatagcttgaggccaggagtttgagaccagcctgggcaacataccaaggccctgtctcctcaaaaaataaaaaatgaaaaattagccagatgtggtggtgtgcgcttgtggtccctactactttggaggctggggtgggaggatggcttaagcctgggaggttgaggctacggtgagctatgattgtgccactgcatgccagcctgggtgacagagcaagactcagtctcaagaaaaaagataatcctgtctcagaacaaagagacagataaataaaataaaagaaactttccatggggcttggcgtgctggagtggctctccctggagataggcatgtcctgggagtggcactcacagcaggatatgaacacagcccttggcatcacccacaatgagagatgggggaactcaacagcacttcgattttctccttatttttctaacctttgacagtcacccattactaactgcagctgtgtagagataaagccatgttgtagtcaagtggagacttctcagagggcagtctggaagtaggtgggatgtggccagattacagagggctctgaagtgaggcagaggcttttagacttggtcttttaggtggcaaagagccaacgagccagggaagaagagatcgaaagtttaacatgactggcctggcgtgggttgcaggatgattgagggggaggcaggaagggctcgcatcctaagggacccctgtccttgctgtcacccagcggggttgggggaggacactgttgcccagtgtcttgttatgtgttgtttcctttgttccctctaaaaagttcaaatctataatacacccgtgggcatggagaggcaggcttggccagcacatggggacatgtaagagtcgatgttaaaagtctacatgctgggtacgtaaacagatgagtgtttatgaatatgacgtgaattccaatggtgaggctcagatgggaagctcctctctccgccctcctcggaggccagctcccagcagcacacagagcctcttgacagtcgagggggccaggaaggcaggggattaagggcttgggcttgagtttcagattgacctggcgccgcattccagcactgccctctcacagctgtgtgagctgacaggtatccgaccgtgtaacctcagtttcctcctccaacacggggattccacccgtacttactcagtggtggtggttagtattaaatgaggtcacgcagggaaggctttgctgagctaatctgtgcagagctcttccggcccctggcacgtagtaagtgctcagtaactgttctctactgttaccatcacccacatggctaggagatggcagggcggtggtcggagggtggtatccagtcatgccctcccagcctggcccgtctctaggactctcatgcacagagaattcctatttcctgtgcttagacttcagcctgccttgctcagaactgcagcagctggtgagaatcaaactttactcacctcagaggccccttgctgtgaggatgtgagagccctggggtggtcaggactgcttcctctttctcctcctcctcctcctccggccaatccctgctagttctgcagccctggcttcctcaaaagcaggtcccctaaagaccagggcccagggtcagcactctggtcacatgggctggtaagagacatgtgtggatttccggtggtttgtgaccaccagctctgatgctgcttttcactttcttgacagtacctgaaccagtttgagaactgctgtggtctgcgggaaggtgccatcctcaccttgctgagtgacattggtaaatcccagtcccggaattcaggccgtgtccttcagggagagtgtggtgcccctgtgagtccctgcggagccctgcaggcagacacttcaatcctttggtctctgtggaaggggaatgggagcccagggacgggggaccctggtggagtagggaggtcaacaaggagtcagccagacagatgctgaactcaaataggtttcccttccttcctgattaactcatcaggtgaattatgatgtatagggaataacagatttcctttcccattataaagctcccctccctcctttcctggaatggccggcgctggaataagttgtcattcgaatgagttttgtcccttggcagtgaatttttccgctcccacgtaggcagttctttgccaatgagaggcgtaggaaaaactgtcctttttaatcccttgggtactgttggcttccccaaatgagggcatctgcggcaccctctgagaaggccaagctggccattcatggagaagagtgacctcagcctgcagaggtcagtggagcctcctagaccctggcgctcactcaggaggggtctgagggctgggcgctaaaggtcagcacctggccccagcctggggagacagggagagggacttgctcagagctttttgttttttttaaaaaataatctccagggttgttggtgcaagttgatagttggggtctaaggtttagagttatcagaatttatctttgactctttgcctccagatttggagaatgatgccattttcatccctccactacctcaacctttcaaagctgtatacattttttctttttgtttgctcaagtttttttggaaaattgtcaaatatatagaaaagttaaaagagtagtacagcaaaactcacataccgttcccctcggttcaccagatgttaacattctccctcatttgtaaagctgtcttctctaagccagggcctggaagggttgatggtccaacactgtcttgctagtgtgggtctggtctcttcctgactgctgcttttgacagaggagaagcaagaaggaaaggaaggggaaaagtcaagcaatgacatatttaaggttaagatccaaatagtctgacacagaaaattcccatcttgctctgtgctgtgtcttcgtccctttgggtggagttcacatggaggatacgttgacattacatcagttttatttgactcgaatgagcacccagtgctggcccaagggatcccctgcacatggcccgcatgagtctcttctctgtctacctagagcataatccatcagttagaaattccacttgttttcttgacaccctgacccaaggctcacccatccatgttttgcttggaggcttacttgattgtattttttacctcagtggccagattcttcatttgttctctgttgaattgggttgaaggcaggttagcaggttggggagtattctcttgcttttcttgggtgatttttattttgtttctctttggttaaagctttgtcaagttattattttttttttggatgtttttctctcagatatttttctttcactccttaggctgttgatgactttagcaagtagttattacgaaagtcttttttttttttttttttttgagatgatggcttactctgttgcccaggctggtgttgcagtaggcgacctcagctcactgcaacctctgcctcctgggtccaagcgattctcctccatgagcctcctgagtagctgggattacaggagcacaccaccacacctggctaattgttgtatttttagtagagacagggtttcatcatgttggccaggatggtctcgaactcttgacctcaagtgatctgcccatctcagcttcccaaagtgccgagattacaggcatgagccacagcacctggccaaaagtctttaaattattggcacaagtgccgggcgcagtggctcacgcctgcaatcccagcactttggggggctgatgcgggtggatcacaaggtcaggagttcaagaccagcctgaccgagatgctgaaaccccatctctaccaaaaacacaaaaattagctgggcatggtgacgggcgcctgtaatcccagctactcgggaggctgaggcagaaaactgcttgaacccaggaggcggagaggttgcagtaagccgagattgcaccattgcactcccgcctggtgacagagtgagactccatcttgaaaaaaaaaaaaattattggcacaagtgcacataactctcagcttcctcatatggttgtttattctgcaggtgttttgctgctgatattcacagaacctctctggttacgtattcttttggtctgggtccactttgaattcagttactattgacttgtgtggtagcttttatattattttattcaaattgtgtgcatgtatgtatttaagttacacataaattagaataatgaaaacaggtgcttcttcttaagtgcttgtgtgctataggtctcctatagatagataggtaggtgaatattaaattctgtaggttgctgattctctgtctgtcttctctgtgaccctgagttggaaataatttgactttgaagtactaactagtacactacagttaaacttcttgagggcacaaacttcagtcactgcttatcttcagcatctagaatagcagtatataatcttctctataaatatttgtcaaatgagagctggatgcggtggctcacgcctgtaatcccagcactttgggaggcggaagcggacggatcacctgaggtcaggagtttgagactagcctgactaacatggagaaaccccatctgtactaaaaatactaaattaggccagacgcggtggctcacgcctataatcccagcactttgggaggccgaggtgggcagatcacgaggtccggagttcgaggccagcctggccaacatggtgaaaccccgtctctactaaacgtacaaaaaacccaaaaaactaaaaactaaattagccaggtgtggggcatgcctgtaatcccagctactcggggggctgaggcaggagaatcacttgaacccaggaggcagaggttgcagtgagccaagatcgcaccattgcactccagcctgggcaacaagagtgaaactccatctcaaaaaaaaaaaaaaattgtcaaatgaatcaaataaatcctaaaggaaattaaaataagtaaggacctagtttttttttaaaatcaaatgtccacacatcatgaacagctccaggtccaatactggctcctttgcttattagcagtgtgaccgtgggcacgttacttacacccttttattagcggtaaaatgggagcgttactcaccttgttagaattatggaataaaatgaggtgatataaataaagctcctagcacaatgctctgttcctgcagaatgtgcagtcagcaagtgttagttccttgctcatttccttcccgctctggattttgatttttggcctctccttttggaaaccttcagtgccttctttagggcatgacctgaggctggatccagggaaccacacgggtgggtgccttctgagactcccatcctggaagaggccagccttcctcagacctgttcacatctccgccaccttttgggtgcagtgcagccccggttttgtttttgaggctgctgatgagctcgtattttacttttatccctgtttctgatttgtattctaaatccattaaatttctttttgcaaggatctggtgactgagccggagttcatctaacatagctcttttgtattttggaacatttcctgagcatattttgttccagtttgttccaagtgctggcctcacatttcctttgttggagttgccactgctgttctctgccaggttgacttcagataagtggcagagccacacccttgaccgctgggtccggattcattgccttttcttctggattaaactgttggcccctactctcttctgtgccgctaacctcccagagacacccgctcagaacagtgtcaagataacagacatggataggatttttccactgaatttcaaattgcccaagaagaggctgcagagtgcctgtgagaaatgagcagatggccaggcgcggtggctcatgcctagaatctcagcactgtgggaggctgaggcagatggatcacctgaggtcaaaagtttgagaccagcctggccaacatggtgaaaccccatctctactaaaaatacaaaaattatctgggcgtggtggcgtgtgcctgtagtcccagctactcaggagactgaggcaggagaatcacttgaacccgggaggcagaggttgcagtgagccgagatcgcgccattgcactccagcctggcaacaagagcgagactctgtctcaaaaaaaaaagaaaaaagaatgagcagctgcctggcgggcacagaggtgagccccctgcatcctggccaggactcttctgccagaccatcactccatgctgataggagacctgggacccatgtggagcagctggaaatgatatggactgccacgtaatgtgaccctaaaatagctcaaggaagttatatgtgagtggactctatttaaacagtcttgctcattatcctttggaaaacattggcatgtgttttcttttgtcaagggaggctcaaaattctgggcactcaagattgcagggcaggctgtggtgctctctcctgcctgatggggtgtggctctgctgggcgggcctgggtcttatcagatcttagattggaatcagcctttcctggattctgcaggtggccagtctgctgtggtgacaccatcctgtgctccaggcctttcgggaacccacccctctgttgctgtccctgcttccttctcgagctgctcctagcaggcatccaggacttcagcgttaaagaacagagggtttcagagaaaacatttggctttggggaagagagctccattccaggaactgcacatcaggtgcactgtctagcattgtggatcttctgactggttccattgcatgcatccatctgactgaagtgtggattatagcaaaagatcatttgcacataaagctttttggaaagcataagtaaccaggttaataaatacagtaacaatgagagagaagacagcaggccctcagtcatggctccaccattttatagctctagagccttgggcgaggcatggaatgtcatggccgcagcgtccccttctttaggatgaggggtttggacctccgagtgctctctagggccccgtctccctctaacaactccatttcactgtccagaaatctggttttcaggatggtggccccgggacatctctgacatccgccagctggtggcctaactgcttcccacaggctctgtgtctcatctccactgcctgcccctgcattcgcctgtccgtccttccctccctgcccctgcgctggctgcccgctgctcctcgacgttctgtttccctggccgttcttgtggcctgtttctcaccatattgttcccagaatctggaattcaaccctgaactcatcctaaagtcatatccatgtctgccaggtctttcttccaaagtcaattccagtagaagctctggttgtcttcttcagccaggtccctcctgccatcccctttcttgtgtcatggtgccactttctgcccgctgcccaggaccaagtgtccgtgtcgaacctggtctcacagagtcagcccccgctcctgctcatagccttgcattacggaggctgcagaccgctgcttctgctgattcaatgtcagagcaaatccctgcagcgacctcctccctggcctccttaaccctgtgtgctaacctacccttctgtcttggaagggcacttccatcacagtccactcttagataaaggcccagccccttcgccgtacctttctcccactcagccctgggcatgacccacaggacccacccgccaacctctgtgtgtgacccttggaacccacccgccagcctccaggcgtgaccctcagaacccacccgccaatctctgtgtatgacccacagaacccacctgccagcctctgtgtgtgacccgcagaacccacctgccagcttctgggcatgatcctcggaacccacctgccaacctctgcacgtgacccacagaacctacccgccagcctccgtgcgtgattccaaacccacctgtcccttgctggccttgcacgcgttgccccttgtggaagctgttcttgcacctcccagagaccctgagcctgcccgtcctttgggcacagctgcagacctgcccctctgtggggattgcctggcctggggtcacggggattttcctgtgggtctttctgctgatgtcacctcatttgctcctttgacgcttggcattgccattactgctctgtgatttctgtctgtgccttggcagtgagggctgacttccgggtttggggccagttgaccagactgtgcaggaagttaggaaaaggctttgattcagtggcatgtttcccattgtgtgcagatagtggacactcaatagagcctcgctgagtgaattagtgaagttgtcgcactttcgccttggcacccaacgttactgccttgctgcctcactgattaattgaaggctattttagccaagtaacctttagccagactcagtctctctccccatgtccacagctggccttcaagtctgttttttttgggaagcccagtgacattgaagtggctggcacagtaggacccaggcagtaggttttactgagggaacggacatcctgttgcctttctcactcagtgatgacttggattaccagccagttgacaaccaaccatctttgtacccttctaacctctatctcagcctcttggaccatttctctttccacctgttctctatggaatgtagctcaaacaaaaatgttctgaagggaacttagtcatccctctaaacttgtgatagatagagattcatggacccacccttataaaactgctttcttctcggaagtcttgctgctcttatctgttccccagtttgtggtttgtcatctgaaaaaaatacatagggctgtggggctgtgattcggagctgtgattcatcaataagacccacaggattgtcagcgttcttcagttatgtgtttgtgccttcctcatgagccagggaaaggctggggttaccaccggggcacggcttctgaggagggtgagagaaggaggctgttatcttcctatggcaagtctgccatgtggacccattctgtggaaatgtactgtgtcatttatcttagtttttgtgtttttcctgcatacactgcactgtgtcgtttattttagtttttgcatttttctagaggcagggtcttgctctgttgtccgggctagagtgcagtggcacgatcatgtttcaccgcagccttgaattcctgggctcaagtgatcctctcacctcagtctcccacgtagctgggatgaaggcatgcgccaccatgcctggctaattaaaatttttttttttgtagagacagggtcttgctatattgcccaggctggtctcaaactcttggcctcaagggatcctcctccctcggcctccgaaagtgctgggattacaggtgtgagccaccatgcctggcctcactgtgtagttgtgaatagcttaatagtttgcaatgtggtgcttctcacagctcttctctgtaatgggaacatgaaaaattacctggtacagttttatgctttgtggtgtggcttttaatttttataaacatgtcttactgctattgccagggatttagatttttaataaacttccagattcaacagtatttttcttcatctcaatgtctcatttttcatcaaatttaaacaaagttagattctctgggcttgaaacaattttgattcatttcactttagctctgaagtactgttttgtaaaatgtagcacagtgatactgaaccaagctttttgaaagcttattctctgcagggtacatttaagaggacttgcctatcagaatttttacatttcagtcccagaaactatgtgtaacaatacctgttggattctttaaatctggactttattaagttgacagaggtattgaagaatagatgaccaccccgaaatgaggaataaagtttgttttgtacagttgtttaagcataaaaatagacagatattaatagtagtcagagtattcagttaccaacctcttgtccctcctcactgaagatctggtgacaactctaatccacgtggcgtagagagcggtgcctttggtctaatccgaatgctcctcctcttcactggggggttctggggacatctcacctggttgtgccctgggttttgccctgagatgttagcctccagctctgggggccttgtctcagtctgggcatgtgtacttgctcaaattacagtatctcaacttccatatattctgctttggaaaaaactaacctacacttttatgtattacatcctgatactctccagcagtctgtcatataccaaaacaggtcttttgtgaacctatcagttaacagacactttgagttattgcatggccttgctctctgccagccagtagttcatattcaacagcagtgccatccctgtctgcaaggctgtgttagtgcagctattttttatacttcatttaatttattatgctttttcatttgctttgatttttaataaaagtaaaacaaaaataaaagtgctgatgagaagcattggtcttgaaacattaacacaattgagaacaagatgaaatataattttttaggcacatggaaagcagcgagtctttcacctcatctggacattaattggacctaagctgatctactctgtcacttaggaaggaaatgaaaagtaaggaacagtatgatatgttggaaccacatggtcgaaggctggacttaaaagagcagatgcaaggagagatctggcaccacagatagagcatccctaatcccaaagtccaaaatctaaagggctgtaaaatctgaaggtttttgtacactgacatgatgccagaagtggaaaattccacacttaagtacttaacacattgttccatgcacaaaattattaagactattgtataaaattaccatcagactataaaatcatttataaaaattcagttgtttcatataaggtatatatgaaacaaatgaattttgtgtttaagcttgggttcattaggaatatgccagtattccaaaatccaaaaaaaaaaaaactgatcccaagcattttggataagagatactcatcatgtatagcttaatgttctgagctggaactcctttaataaggtggaagtcagttgttcagctctcagtttgactcttaaatatgttttcagcaaatgttcagcttagagtctttgcagagaatgtttgcttactcagtttctgtggaaggcttttccgttaccctgcacagagggccgtacccatgacagcagataggatcgctgcctgggcctcaggggtcttcccctccccggcttgccgagagggagagagagagagagagagagagagagagaatgagagagagagagagagagagagagaatgagagagagagagagaggagagagaatgagagagagaatgagagagaaacagagagaatgagaatggtggtggcggcgacggcatacagagggttcattgttaaacctctgaatgttactgcttttgactttttaagttttaaacaagaaacaggtcataccattaactatccctctgagtcagaaaatatagacccaagagttgcctgttctaatgtggcactaccataatttgttctaacatttcctaatgactgtctgtttctaattatttcattcaagatatgcagtaagtatccttgggctaccagtgaagtgataccatttgtatctcttcttctgtgctttctcaccacttgacattctttgcccatttttctttttctttttctttttttttttaggtagagtcttactctgtcacccaggttggagtgcagtggccatgatctcggctcactgcaacctctgcctcctgggttcaagcaattctcctgcctcagcctcccgagtagctgggattacaggggcatgccaccacacccagctaatttttttgtatttttagtagatacagggtctcaccatgttggccaagctggtcttgaactcctgacctcaggtgattcgcccacgttggcctcccaaagtgttgggattacaggcgtgagccaccgcgcccagccccatttttcttctgcattgctttcttattgatttataagagctttttatctattaggtatctttactctttggtgtatgtgttgtagatattgtttccccacctctcttatcttttggctttgtttatagtatcttttgccataaactttgaaaaccttttaatgttatttgcactgttctatttataccatgtgactttcctgcatacactgctctttttgctacatgtatcccatggtgttttggagtttttgttgctaatgtgaatgggattttttttcctttccactgcaactggatatagctaacatagagaaaagctattgacttgtgtattcttgttcgtttccagacaactggctaaattttatccagtgtttagtctgttgagctctctaggctacatctccaaatctatctccatctctagtcatagcatctccaaataaaaataattttatctcatttcagtactatttatttcatttctttcttttatagtgcagtgaactagatgtctgtcaaagttattcaccctctcttgagggtaaaatcatgtccttcttgccatctgagctgcaggcgggtgcctcctcatgtgacatcatcacgttgcctcctcacagcagaagctcttggtatcaaatgcttccgtagccagtgttgtgcagtctgctttcttccaactagattctgagctctttaaagttggggatcatgccccttattttatgtccctcacagaacctcccagagaactgggcatgtagtaagtctgtgtagggctgtctgtatgtgtgggaggtgtccctgttctcctcttctgcctccccgctgcttcctggaagccagttctgacctcttgggactgtcgatcatatgaccataggactctgtccccaagggcccttcctccttgcccaccctatagaatttagatttttgagcctctagaccaaagaaacttcccttctcaaaactttattggcgtcagcatcacctggagagtttgttaacacagatcgtggggtcatccccagagacttgaatccagaggtctcaggtggagcccgagaatttcacattttgaacaagcttgtttgctgctggtccaggtagtatagtttgagaagcactgctctaggctgcagttggtgacctcatggatgcaaggcaaagagtgctttgcgcaagtaagccagattcctgtggaagtttaagcctcacgtagcagggcccctgccctccaccctgaggtattgcgctacaagtcagagtatgtttcaggggcatgcggcatttatcttttgcaggataggagattctgtcatgaaaagcattttttaggcctaagaaaaactcacccccctcttcctcagcctctgcgcttagataccttcatgaaaacagaatcatccatcgggatctaaagccagaaaacatcgtcctgcagcaaggagaacagagggtaagtgacctcctgggactgggaaagcctcaggtgggcgtgccgggaagtggcctgggaggaaaggagcacactctgcatatttgtgtgtatttgcatttccttgcctgtgctttgattctctgggaatgctgtttgatttgaaacaaaattgagcaaaaaagttgttgcagattgaggcaagtttaaatggattacattgttagttgctcaagttgcaggaatctgataaggaaaataatgtttgccttcctacctccacccctagcctctgggactagcgcttcttggaagtcgactttttgttttccatttgctttaagagcctcgcctctcgactctaaatggaaaccagtggtcagttggttgtggatgtggctgggaagaggcactgggagctggcctctgctgccaagcctggtccagcctatagtttccccagagctctttgtggcctcctcagtggccacccggctcagacgtggtgttgactgccccacaagcttgacattgtggtctttacccacccactctatgtgttcagctggggtggtgagcacaggctcagctgagtggaatacagtgaatgagttcttagatcacctaatcccttcccatacagctgcccttagcacctaggcctggcctgtgactaccacagggctcgcccttgttccagttcaccctcactcctgtcagtggtgctcagatttgagaactgagggcatttactgagaagaggctggcccggtccttcctgtttcaagtctgggtttagctgtcttgagggctggtgcctgttctgttcattcagcttccctctgatgatgcgtggcagagtgtgggaggacacgtgcctagcatttttacaatatgccttttcttttagccctgaatctaccgtgtcgagggcattcttttgtgtatctggtggctcttaggagtttgggatctaatagtacctgggaattcagaaatacctctgctctaacaccaggcagtcagaatcctcgtagaaggacattgtgttcttataaccctcagctttctccttccttttgttttagttaatacacaaaattattgacctaggatatgccaaggagctggatcagggcagtctttgcacatcattcgtggggaccctgcagtacctggtaagaagtgggccttgcctgtttgcctgtcagctcctccctgctgctgcatttgtggggctcctgtcctgccttgctcccagcacctgagtcccaccggctctctgaatgttttggagatgcatgaggtcacacccataacctggtcgagtcagcattttttgccaccagatgccctgtggagggatgtggtcgtcttctctgatgtccggagggctctgctcatgcgccttgcaccatcccctagcctctctgtgcttcagtgtcttctctgaaaggaaagggttttaaacagatccatgctggtcttgagcggtcctcccacctcagcctcctgagcagctaggactacaggcaggagccactgagcctggccgaggccacactttccatgaggtatttcaggggccactgagtaggggtcagagctctgagctccccaccctttgtttacgttatttggtctgaatattaggtttctgtttgagtcactcattcattcaagcatattgatggagtgtagtctgtgtcaggcactgtgctcagggctggtgatgcagtggggaaaaaagacaagcccttttcggccttcagagcttagggtttagcaggaaagcaagcattactgtgatgcttacacagataactaagaaattacagttgtggtgagtgttacaaagcaagagtgcagggtgttgcaagaatatatattgggtggcctcagcctggtctgggacttgaagggtaaggaggtgaaaagggctggaggtgggggacggcagggggaattccgtgcaaagggatcacacacaggaagacctgcaggtgtggctggaaccgagcacaaaagggaaagagagtcttgagttgaagctgagaacaaggtagagcacagattatgaagggccttcagggctgggctaaagttctagactttatcttaaaacctctgcagagattgatgggttttaagtgggagaaggagcaactctttggaaagcccactcctgacactgtgtggagaaggaatcacactgaacaggagggaagagtgggtgaggtaggggcagtgaagatgtagagggcaattagattccaggagggcttagcacaaatgcccagcaagacttgtcataggttgcttgatgatggcagtagccaccacaattgggagtgactcaaggagtctgcggctttcagagtgggtctcacagagggctgtgattcaggcgcctgtgtccatatggcatgtgatttggtagatccttctggagtcctcctcagctcagcagcagtcgagcaagggggaccccatgctctaaccaggagctgagtcaagtcatgtactcacatgagctaaaacgtctgcccataaccagacatagaggttgacctacccatcccggaatgtcttctcttggtttggtctcccgggcccttccttaagcttcacatttccaaccagaccatgcaccaccctgtctctgtgcttttgcttgccccagtcatttctgtctccacccacctgctaagcccagtctgcacccccagcaccccgtgctgccgccccttcttcggtcaccccagcgctctctgcctcagcagcagccatgcatcacactttccctgcctgtttctaaatatcctggccctttctgcaaccacatggtacctggttcaggggttcaaccagcacttaatgcgtgtatttggtgtggacagcctggcatcattttcctttaacatttgtagcctctcttcccatttctacacagtgcccacgactgtgtcctgccttaagctagttttcaataagcgcctgaaatgctgcaaccctttttttttttttccttttttttctttctttctttcttttttttttttagacagagtctcactctgttgcccaggctggagtgcagtggcatgatcttggctcactgcaacctccacttcccaggttcaagcgattcttgtgcctcagcctcctgaatagctgggactaaaggtgcacaccaccatgcccagctaatttttgtatttttagtagagacggggtttcaccatgttggccaggctggtctcaaactcctgacctcaagtaatgcgcctacctcggcctcccaaagtgctgggattacaggtgtgagccactgcgtccagcctgcaaccctcagttttaaaggagagaagttaaagcctagcgatgggtgtgtgatgtactctggccctgaatctttagcccctccatcagtacctactggagtgagtgggacatagaaaggtcttagaaatggtagcatgatatacccgctaaacatgcctggggtgccctcctcgccctgcatgcatgtgccagtgccctctaggatgaagccaggggtgaaagcagatgggctggccgccccctcctgccgtggtccccccagagaggagcagctcaggtgtaccccctcctgttgctgcaggccccagagctactggagcagcagaagtacacagtgaccgtcgactactggagcttcggcaccctggcctttgagtgcatcacgggcttccggcccttcctccccaactggcagcccgtgcagtggtgagtgggcccggggcacctggatggaggagggagcctgtctgttcctttctcttcacgtaccctgtttccctggcgccccatcaccgggcctgggagatctgtgttgtttctcttccgagaggaaggcctgtcaggacctagcacgagtaggggagtggtctgtgctccaaggacctgttaatagatagagtagctgttaagtcttcatgtggattctgagccttcacatctttaaatacaatgctgtgtcagtgtcatctgctctgtgttcagaagtaagactattgtatgaatatacgcacttacactgagaatgctgtgtgttagtaaacaaataaaacacgtgtacacatgacaagtcaggaggaaatatgtgaaaatttgttgttgacaaatgttactacaacctgaatataaatttttgtttttaaagcgtaagaatgtggccgggtacagtggctcactcctgtaatcccagcactttgggaggccgaggcaggtggatcagttgaggccagcagttccagaccagcctggccaacatggcaaaaccctgtctctactaaaaaccctagccaggtgtggtggcgggcgcctgtaatcccagctactcggaaggctgaggtgggagaattgcttaaacccaggaggcagaggtcgcatcactgcaatccagcctgggcgacagagtgagactctgtctcaaaacaaaaaaagtttaaaaaaaaaaaaaacaacagctgagcataaagcataagaatgtagctgaaattgtgaacctaataaattacacaaaaatttttccagtaaaaattaaaggatatgatgaagatttgtagaattaccctgtattctttagcttttgttttactgattaaagaaataatgcattgtgcaggatatgtttatataaaagttaattatcaccaccaaaaatggtatgtgaggtaatgtatatggtaattagctcaatgtagccatcccacaatgtgtacatcatgttgtacaggataaatatagaccatttttatttgtcagtttaaatcaagaactgggggcagaaaagaaataaaagttaattattactgaaagccataatttaaaaatgaatattcccccaaatcagttagatttcatttaggattgttccttgagaggccacacactagtttaaatgatgctactctgctcaaaatttacttacttcaagttttattttttttggaaccgtaataagttcatgtggctcaaatttccagaagaataagggagtatgcagtgaagtcataccagcctcccaggccctcatttacctccccacaggcacctgctgtcttccaagaatgttttcatatcttccaaggtgttcgtatcttccaggggtgtttgctacgtgttccagtaaattggcatatatttgtttatttgtacattgatgtttcccctcttttttatcccaatggtagcattatctgaacacggtcctgcacatgctttcaagcttttcacaccatgagaatttctttttgagccaatttatctgcaacacaaaaaattattattttgaacttaaatagtactgcatagtttaattaccccctcatttttgccagattaactttgtttcatttttgtgttttggaaaatatggaaacagtaaaaaagcaggaatcaactgtcatcccataattggaaaacaatcactatgaacagttgtgtgtctccaggctcttcagcgttatatttttgtactttttaaacaaaaataggttactataatcttcatacaacgtgcctttcaaactagatatcaaaaatgctgtatgtttttccttattatttgtaatgtctgttatttcactgaatggctgtgctgtggttcatttaacttatcccccgtggttggaaggacgttgataatttttacttcttaaaataacaccaagaataacatccttgtagggaaattcttgcacacagttgtttccctaggataatacctagaaagggaaataacagattaaagagtttgcacgttgtaaaggtttttgatgcatattagttagcaaactgctcaccaggaaggtcatataaatacacgtctccacctggagtgtggacactgcccctttcaccacatccttgccaacactggctattgtcaccttctggaagtaatgaaaacaaaacatgaatgttttcagaggacaagtgtctacatcttgagagtatttgtttataagaataaagtgggccaggcgtggtggctcatgcctgtaatcccagcagtttgggaggccaagatgggcggatcacctgaggtcgagtttgaggccagcctggccaacatgatgaaaccccatctctgctaaaaatacaaaaattagctgggcatggtggcacacgcctgtaatcccagctacttgggaggctgaaacaggagaatcgctggaacccaggaggcagaggttgtggtgagccaagattgcgctgttgcacttcagtctgggcaacagagcaagactccatcttaccaaaaaaaaaaaaaaagaaaaaagaaaagaaaaaaagaataaagtgtatcctttgaaatcaattccagaaaagtggtcttaggtgatggcagtctgttcaattccacgtttacctcccagtgagggaggtgtctgccctgagttttgagaagtggcaaagtatgccccactatggtgacttattttaaaacaggcattgctcctttagctacataggttctggaatattgaggaatttgttcattaatttatagtcacactttatagtatacgcattataaaaatagctttaaattgcatgtacatctatagtgggtttttttgtttttgtttttgttttttgagacagaatctcgcttttttgcccaggctggagtgtagtggcgcgatcgcggctcactgcaagctccgcctcccgggttcatgccattctcctgcctcagcctcccgagtagctgggactacaggcgcccgccaccacgcctggctaattttttgtatttttagtagagatggggtttcaccgtgttagccaggatggtctcgatctcctgacctcgtgaactgcccgcctcggcctcccaaagtgctgggattacaggcgtgagccaccgcgcccggctgtagtggttttaactaaaggaattattgcatttcttcaggtcacttgttgagcatgtctcttatttatgacaagatgagttaaaatccattagaactagaagaacaggtgctttttgaaaatacattcctaatggcccagcgtcttcataggaaatctgttgtctgcagagccatcttcctagagcttccctcatcagtgctggaggaccaggtggccagtttcaagtagatttctctgaaacccaataaggagctgttttgtggactatctagtttttaatgctttgggaaacttttaaaaaatttcactatcttatctcagatggcaggtaaatagtaatttccagacaaatgcaatttgggctttacaattctattataaagccactttgaaatatattttaggacaagcccaagcaataagcatcttattttgggtccttttctaatttcccatcaacagcctaagttttctagcagaggcttattccacacttacataattagaaagtcttggagcccccgacttagagctgtcagagtttcagcccaagctataaagcaccagcctctgccacgcaccggctcttctagctttccagtgccagtgtgctcccgataggccggttcaccacttgccaatgagaattgtttggagcaaagcattttttatttgaatttcctagatgttttgaggaaaaaccgtagttggacattcagacagaatagaaagaacaccagacattgggtttgagcccctgattctgctactctgttgtgtgaccttggacaaatcatttgatcatcatttcctttagtccaaattgggggactaaaaataatgtctgccacatgggcctgtcacggcaataagtgaataaatgatctgtgtcagagtacttggttatctatgaagtattattcaaatttactcttcttattaccaagatttgaagccatttgtatgtagattatttttactggccgggcactgtggcttacccctataatcctagcactctgtgaggccaaagtgagcgaattgcttgagtccaggagtttcagactagcctaggcaacatggtaaaaccccgtctctacaaaaaatacaaaaatttgctgggtgtggtggcgcacaccagtagtcccagctactcaggaggctgaggagggaggattgcttgagcctacaaggtcgaggctgcagtaagttatgattgtgccactgcattccagcctgggcgacagaaaaaaaaaatttttttaccttcagatactacttcacataccccaagaagttccctaagttgggaaatgtataagttcatttatccttagtatttagctgtgtacatttagagggaagtatctatgtgtgtgcgtaggttttgcatattttatgtaaatgtcgtatgcatgctgtaatctaggtttggaagtcctaattttaacctctgtcaaaacacaagagtgtgtaatagatgaaatagaaggtagagcaagggagaaggaaaagccaaggatgagataaggaggcagtggtactatctgcagaactctgggcacaagatggtcagtgactctgctaaaggttgctcttcaaaaactcatccaggcagtcctgaccagtcttaaactctcaaagaatctgcctgactcgatgtgaatgaactgactgctattccaaaagactggggctataagtctcctgtatagttgtaaacttatattacaaatgtaaaatggctcttgagtgctaagtgtcgtagggatatgtatgactgtatatttcattgacatcccagtcaacaattgactgcatagatgacagtggtctcatgagattataatactgtatttttactgtaccttttctgggtttagatatgtttagatacaccaatacttaccattgtgttaccctggcctacagtattcagtaccggagcatgctgtacaggtttgtagcctaggagcaatagggtgtacgatacagcctaggtctgtagtaggctaaaccatctaggtttgtgttatgttcacacaaggactaaaatcacctaatgacgaatttcttagaatgtgtccccgtcatagcaacgtgtgactgcacctaacaagattcatatttgcaggcattcaaaagtgcggcagaagagtgaggtggacattgttgttagcgaagacttgaatggaacggtgaagttttcaagctctttaccctaccccaataatcttaacaggtaaggcacagcggcattacacgaatacatatctttcttgctttttttagaaatacaagtcttggctgggcgtggtggctcacacctgtaatcctaacagtttgggaggctgaggcaggtggatcacctgaggtcaggagttcaagaccagcctggccaacatggtgaaaccccgtctctactaaaaatgcaaaaattagccaggagtggtagcacgcacctgtaatcccagctactcaggaggctaaggcaggagaatcacttgaacccgggaggcaaaggttgcagtgagctgagatcgtgccactgtactgcagcctgggagacagagtgagactccatctcaaaaaaaaaaaaaaagaagaaagaaattcaagtctgaagtgacatctgataacttttaaacaggctatcaggatatcgtcctgtgactaagaaattaacatagtccttcttaatcttaaatctggaatgggttttcctcccttatctccctagaaatcatctcttttctaagttcacataacaatttatctatacctcttattacccttaatagcctctaccttgtatcacattcggttttgcatagggtttatctctgattcaacagcagtccttttaagggtagggaattataccttatttctctttccacccctcatgtggcccaattctgtgtcacagtcaacaaataaatctttgtcatttgaatggcattacaatccagtctcagagccagaatctaaacaattaataatattgtataattgtacagaattgggtaacagtgcaaaagaaagctacaaggcagtcacacataattgagtgacatggataatgattaccatatttagagggtggaagagatgattggatggattagtgctatatggaatgacgtgggataagctagaactttttggaagggtctagacagatgtacaggacatggatagatgaagagaaaggaggaaggaaattctaaggggaaagattgaggtgagcaaggcacgtttgggaggtggtgagtagctgtgttggcctcagggaagggtttgagtgctcacaggaggcaggctctgcagggccaggggaaggagtttggagtttgtcatgtgaaccgctatatctggcagcatgggatctagattctgtaggggtcacctaagctaggatgtgcctataaagtgtatttttaaaacctcatgggttattctttttccccttctttcttcctttctttttaagacagagtctccctcttgtcacccaggctagagtgcagtgtggcacagtcttggctcactgcaatctctgcctcccaagttcaagggattctcccgtctcagcctcccgagtagctgggattacaggtgtgcatcaccacgcctggctaatttttgtgtttttagtagagatggggtttcaccatgttggccaggctggtctcaaactcctgacctcaagtgatccacctgctttggcctccccaaagtgtgggattacaggcatgagccactgtgcccggctctcatgggtcattcttatgcagccatttggaggtcagcaatctctgatttgggggtattttagaattcaggagagaggtgtgaacacctgaataattgattggaaatgtttatactgtttctgataaacccattttcattttcaatcaccgtctactggctgccgtctgtgtgtatactgggagacgcacactgtagcccaacattggctggaagtgtctcctcacacactatgctcctctccacagtgtcctggctgagcgactggagaagtggctgcaactgatgctgatgtggcacccccgacagaggggcacggatcccacgtatgggcccaatggctgcttcaaggccctggatgacatcttaaacttaaaggtgagtgtggagccaagttagccctgaggcaaaagctggggtccccagtggaacatgcagttcttaggacagagcaggggatggggccagctgacctagtgaggaaatttaggctcctgcatcagtctttctgcataagtaaagaaaggacagttgtgctaattgacattggctatgaggtcatagccacagacaggattatgaaagatgcaaatatgcgaaacatggcacatgacctccctccctcaagctaggcccttgctttgtgtggttgggaaatgttgggagtagcagagagaggacctaggcaaatagatgggcatttccttgaagaaatcggttttccagtaacatctgggttgtgttgcagctggttcatatcttgaacatggtcacgggcaccatccacacctaccctgtgacagaggatgagagtctgcagagcttgaaggccagaatccaacaggacacgggcatcccagaggaggaccaggagctgctgcaggaagcgggcctggcgttgatccccgataagcctgccactcagtgtatttcagacggcaaggtgagccctggcttcgtacacaccatcctgtttaccttggctgtgcctcctgggaaactcaacacactttcagatttcaattctgctttgtcatgtagtctgttaatcacacagtgcggatacctggctggtttttaagttggagtatggtgtcctctgtgtggcctgataggaaacacaaatctccttgctggacttgttacttccaaaccctccaagaccggtctcttgcctttattgcaaaaaatgatgctataacactcgaatctctcaagttgcctgcttggccctcttccaagtgtactaaaaaaaaaaaaaaaaaggatgctgcactttcttgagtcaactgaaagtatttatgatggcctctgtgtacagaactgggttaggcacctgtgttaactatagctgtgtaagacatgacctctgctcaaaaagaccttctcagctgacttgtggagctaaagttatcatatgagaaataatcattgcatagggaagtatatagtgaatttctgaacttcccagggaagacagagagtaaaatagaatgtaatacgtttgtaaataaagagtgtgttcagacagtaagtgtggctggaaacgttaaacacttcatggatgcttcctacttgctggctgaagatgatgctcttgctgaacagtggggaaagctgtggaacttcttcattatcagttagaaaagagagggttggatccacaagattcattttgtccttgtccctttgcagttaaatgagggccacacattggacatggatcttgtttttctctttgacaacagtaaaatcacctatgagactcagatctccccacggccccaacctgaaagtgtcagctgtatccgtaagaatttgttttgttttgtttttctaaataatccgttataatatgtgggacaaggcagggaagggagactggactaaggaagggggagccacgtaaaggaaattaatatcgccagtcctcagggcagccttccttatttaggacatgcaaggagtagccaggcaagagagagtacaggaaaccattagttaatttcaacctcctaggacgggcgtggtggctcacacctgtaatcccagcactttgggaggctgaggcaggaggatcacttgagcccaggagttcaagaccagcctgggtaatatagtaagctcgcaagtctactaaaaatttagaaattagccagatgtggtggtgcatgcctgtagtccagctattcaggaggctgaggcagaaggatcacttgagcctgagagttcaaggctgcagtgagtcatgatcacccccactgcatgccagcctgggtgacaagagcgagaccttgtctcaaaaaaaaaaaaaaaattctgttgaaaatatatggccctatatacatatgtgtccaatggttcgtaaagtgttccttcaaatcaacagctacttattgaccactggtacatgctgttggtacaaatacatgtatgtgacagtaaccaggcataacaccctccaaagttacatgatcctatagtaggtacaaaacgtgaaagtgccagtagtgtcgaaggcaggatatggttaattgtaggagagttattgtggttattctttgacaattgcttgtgtctctgtctccagttcaagagcccaagaggaatctcgccttcttccagctgaggaaggtgtggggccaggtctggcacagcatccagaccctgaaggaagattgcaaccggctgcagcagggacagcgagccgccatgtagcgtgccaggctttttttttaaacttaatttatttaaaattccttggtggctttggccacagggaggtggttgaggcagggacccagaagcaaccgttatgagcaacaaaaggaagacactggtttggatggacgggaagcggttgggtgggctggactgacggaggcccctttagacctggcgaggtgagtgtggttggcacagggtgaggagtgtggaactgaagctgggctggccaagctgtggctggtttgggaacccagaggagctcactaccatgtggattagcaaaactcccctgaccgtgctgctggggacttacggactctttcctcattgtgactcgtttgccaacattattggccttttgtgtcttcctttgcctgatgtcaagtttagtgcagaacctcaggcattgctgagggctaggaaattgtccttgggttataagtggctgctataataatagtgatgatgataataattatagcagggacctcccttgacatttgagggggttttgttattgtacaggaaatggaatttggatcccagagatgctccaagactgttccttgtggtccctgcaggatgaatctcctccgaaacaacagctgcctctccaaaatgaagaattccatggcttccatgtctcagcagctcaaggccaagttggatttcttcaaaaccagcatccagattgacctggagaagtacagcgagcaaaccgagtttgggatcagtgagtgtgcactttgcaatgagtttaaagacaccatttttttttctttttctctttctaaggtttcttttgtcctattataattgagttgcttatttctgtttcagttttgtggtgtttttattttgttttgttttgtttttccttctcaattttttttcagcatcagataaactgctgctggcctggagggaaatggagcaggctgtggagctctgtgggcgggtaggagactcattttgggtttcggaacttaccaagggggtgagattttgtgctcccacttttcactttctcatcaaacactgggtcgatctctgtcaaaaatcaggtgttcctcaccatgctttgagcttaactggaccagctgaaaagaggccaagagagtagccagtgaagggagcccctctgtggccagatgcaagagctgcatgaatggacagagatggtccaggtttaaataagaagcaagggttaggttcccttggggaaaagccaagaccatttcctgttaggaagggcattggatggatgatcaacactccctcttgtcgaaggtttttgactaattttgttgggatgctaaatccataggaaataaaaggtctaggcagaaagtctcagggcagcgtaaatcagatgtcaccaaaaaaagttaattatgaaggcaaaggaaatacatgtgacttaatgaacctcacacaaactgaaggttgaagtcaggctccggggctttttcctggacttatcctctgttttcccctgtgtacttgggcaaggatcttcacctgtgtcttagtatcgatttttatgaatcagtactgatggagtatatgtgtgtttaatggtgaatattaaccatagaagggctgagtgctcctccccatcttgggactcataatctgtgaaataaaacagtctgggcctccctgcccgggtagcatcaggatagacagatgaagagaagagaaagtaaatgtgtcttgggcatcttctgtatgccaggcaccatgccagaggctttaagtacttcatcttacttgactcctcagatggccctgttagaagcctattttatgcaaaaggaaactgtagctgggggtaagtaacttgccaaggggtcacacagctagaaagcggtggaccctagatgcaggcgcagccattcagaccccacagtccacattcctttgagccagtccattgagggtcctcagggaatgtggcgggtcccctggtctcgctcccccgcagatcttgcatctcagcatgcgcctaccacatcagttgacattagcacagcttttccattaggagaacgaagtgaaactcctggtagaacggatgatggctctgcagaccgacattgtggacttacagaggagccccatgggccggaagcaggggggaacgctggacgacctgtgagtactggctggggggcccctctgtgcccagcacacacagacagccctggagcttcggtgtgtgtgtcaagggcaccctcagtggctgtgcgggaccattctctagagcatgcttccctgtggggtcacttccagcaaatcatcactgagcttcagtttccaaatctgttcagtgacaagaaaaacagtcttaagtcacgaagttgtaaggatgaattcagataatgcatttgagacgcaggccataatctgtaaaggctgtaaaatgcaagcagcctctacccctgtagcagactcccctgatttgttccacccaccctgactcaggcatagctcagagcagaaagtaaaacagagaaggaagaacctgatgaggcttaggagtttggacctggaaactattcgtttgagtctttgtcaggtatttggcattggctccatgaggggcggaggggtctaggcagatcactcctacctgaaggagatcacatgtgctcctggcgtacagatggagggaaccaggcaggccgcttgagggctgtgtcaccgtgagctcagcagtgttccctgattctctcactaggattcttaggacaggagctccaaatgtcagaactttgattctgtattttctctaattaaccctttattctcctctagttcttttatttgtatttgtattatttttttaagagacagggtcttgccctgttgccaatgctggagtgcagtggcacaatcatagctcactgcagcctcgacctcccaggcttatgcagtcctcccatctcagcctcccaagtaaccgggactacaggcgcatgccaccatgctcagctaatttaaaaaaaaaatgtttttggctgggcacagtggatcacatctgtaatcccagcaccttgggatgccaaggcaagaagattgcttgtgagcccagaagttcgagaccagcctgggcaacatggtgaaactctacctctaccaaaaaaatgtaaaaattagccatatttgacctcaagtctagacagaacttctttgtatattttagagaggagcaagcaagggagctgtacaggagactaagggaaaaacctcgaggtaagtggggttctgtgtctgccttgggcttctccttatctcatttatggggcatcactactctctgctggcttccttgaggaactatgctaccctccctctctccagaccagcgaactgagggtgacagtcaggaaatggtacggctgctgcttcaggcaattcagagcttcgagaagaaagtgcgagtgatctatacgcagctcaggtatgagccccgaccttcctgctctggaggaaggactgggagatgcaggtatgaggtcaccttcctccctcctctctgattcgctggacctcatgaagagagtttctgcagctgctgactggatgcacagctgccacaggttctgctttctccagcccaaatgccattagtttgccatgtttattctttgcagtaaaactgtggtttgcaagcagaaggcgctggaactgttgcccaaggtggaagaggtggtgagcttaatgaatgaggatgagaagactgttgtccggctgcaggagaagcggcagaaggagctctggaatctcctgaagattgcttgtgtgagtgagtgctgtggtcccgggcccttggcctagcagcctcctgtgcctttccacctctgtgcactgccgccatcccacacgggacaccacagagccaccagcagcccactcagctgctgctcgggcttcacgtcgctgttctttgacttggtgtaagcggggaggtcagaggaagggcctgtgctaattgttttcattcatctgtgtattactttcgtgtggctactgtaaagattagcacaaactgaggggctaaaacaacagaaatttgggctaggcatggtgactcatgcctgtaacgccagcaatttggggaggctgaggtgggaggattgcttgagcccaggagttcaagactgcagtgagctgtgatcatgccactgcactccaacctgggcagcagagctgtctctactaaaaacaaaaacaaatgtgttatctgagctctagagcccaggagttgaaagtcccgtgtcagcagggctgagctccctctgagggctcttggggagggactgtccttgcttcttccagctcctggtggttccaggcgttctttggtgtgtgactccagtctctgtctctgtcttcatgggacccctgtgtcccttatctgggtgactcttacaagaacacttgtcattggatttgagtcccacccaagtagtccagggtgatgtcatctcaggttctctaaagacgctttctccaagtacggtcacactcacaggctccaggagttgggatgtgggcatatccttcttagggccaccaattcagcccaccgtcatgcacggcagtgcaacttggttgaccatcgtctgcgtctgcactgccctcagtgcagtaagccacgctttctgtgcacaccgtcttaacgtagctgtgagtccatgggatgccacatggtggggaaatgggaaacaaaacagccaagaactgagacgggcaggcctggccgtgttgtgggagccagagctgttgggactgcaagccccattgtgaaaggctgcagagaaggtgacatggatgaaagagtgatttaggtgtcagtttcccttaagagcaaagggaaggagagagggagatggttgctcatggtggaagcaggagatggtgcattaggagattctcattgtcaaaggcagaggggacaatccacacacagtgcagagaacagaggggctggggtcgcatgccagagcactgagcatgccttgggagcgtgattgacacatcctcctgtaagaagagaggaacgggagaaaacaggatgacgaggtagagaggatctgaagaggagagggaggtgcaggtatgcgcaggtgatagcctgatgtgccatctacatccattgagcatttactgaatgctaactatatgcccagcaagacacacaggtgagaaggcatggcacctgttcccaggagggcctgatccttcaaggggcacagacagaggcatgagtgagagccgttcagggcaggaagggctaggaagcagctccaggaggcatgagctgcagtttctgtgcacagggggagctccagcttgtcttagaggagagggagcaacaagaaggttcacaaggagctgttccagctgaagagtgaggatgttccaggacagagacactgctttatcaaaggcagagagcctggggagtcagtgtgttctgagtggggacaggctggtgtgtgtggggaaggccacaatggaggatgaagctgctgaggtaggcaagggtgagcttacgtgggccacgcttcattttctttttttttcgagacaaagtctcgctctgtcccttaggctgaagtgcagctgctcaatctcagttcactgcaacctccacctcccgggttcaagtgattctcctgcctcagcctcccaagtagctgggactataggctcatgcccccacacctggctaatttttgtatttttagtggagatggggtttcaccatgttggccaggctggtctcgaactggcctcaagagatctaccccccttggcctcccaaagtgctgggattacaggcatgagccaccgcgcctggcctatgtccattttcaaagcacacaggacacatggcagtatctgtcttttcccttgatattaaaggaacttgagtgtagggatatgatcacatctgggatttggggaagtccctctccaggcagctggaggatctgagtccctggccaacctcagcactgagaagggccgctcagcaaggctggagttgagccgccgctgtgcagcacagaacagggtggggcaggagctggggcagggcctggctgggagggagccaggcagtgcaggagccatcccctgccatactttcggtccagggcagaagcacaggaggccaatgccgggcctctccccaggcatggtcagcagggaaggtgcagcaggaggaccaggaacgggaggcttgggtgcttaacatggcttcttgatgtgtgggccttgaggtttcgctggaggggaggatgtggagccaggatggttccacggcctgagggacacgtgaggggatgaaggactgcaggccgaagtgagtgtcaggtgtggggcctggggggctacatgggtgggttggggaccatgcagggcagagatcagcagaggggtgacctgaagattggccggcggtcgtgggctgtgagctgaggaggctcaggtagctggaatgggaacccctgcttgacccttcgggctgggaggggcagtggctgcagccccttgggagtcagggtgtccttgtttcttctcagccaggtcatagaggatgcaagccacaggaattcccatagcctttgtgtgtgtgtctgtcttctacctggaaaacagtaagaatactttcctgttcttttcttgtaaaagttcattaaggggctggatgcagtggatcatgaatcccagaactttgggaggctgaggcagatcacctgaggtcaggagttcgagaccagcctggccaatatggtgaaacaccgtctctactaaaaatacaaaaattagctgggtgtagtggcacacacctgtaatcccagctacttgggaagctgaggcaggagaatcgcttaaaccccggaggtggaggttgcagtgagccaagatcgcacatcgcacttcagcccaggcgacagagcaagactctcaatcataatcaatcagtaaagctgatgaaaataaaaaagcctgcaaattaatgtaggcacccaggtctccttaaatttagaatcctttcctcaaaagtctccgttgatacagaaacacttttgaagccagatgtgaagcaccagttgacccgcaggtgggggtgccaactggtaggctgtagggttagctctggcctctggcagccagccagttgtctcctaagaaaatactgtggcgtgaatgcaaaatgtgattcatcacttggctcctaatttcttttgattttgtcccctagagcaaggtccgtggtcctgtcagtggaagcccggatagcatgaatgcctctcgacttagccagcctgggcagctgatgtctcagccctccacggcctccaacagcttacctgagccagccaagaagaggtaggtcctccttagcagtgccaagtgtgaccatcaagggcacgtcaggagatcggggatggaggcgtttgtcactggtaaatgtctgtctgatggtattaccacctctctggatgtttgttgcatctgctgggtcctgtggggacaaaagtgatacatgtttggctctcatagtcccttgaaacttactaactagtttctttgtccaaggcttggatgactaactgcttaatgagaacattggaaatgctggtcaggcacatgctgttaccctttatccataggaagccacattcccttcagggaggccctgaagccatctgcccccactcaccctaccagtaccttgagttaccgagtcaccaccctcctcccggtgccactgaccttcccattcttcccgtcctctccctcctcttgcctgaaccatcgcagcagaggtgggggcagggctttctgcctcctgcctcctgcctttctgctgccaggccctgtgtggttgaattaatcttcacgaaataccactctgaccaaggtgttccttagtcagtcataaataacagcttctccctccattatagatgctcaggtctgagctttcgtcaagtctcatctgggccagcagtgcatcatcaaattctcaggtcctgctggagacctcacttgagagctcagggttggggcccagcagtctgtgtctagcagccctccgcccgttctccagcacactgcaggccacttctgctcccacgcccatctcttcctgtgttttgttttgtttgacaccttctgtgtgcagggctctatgggttcctgcaggctaatctctaggcatgggaaacaccgatgattacctggggcaggggaggaggttgggagtgactgataattcaaggtttcttctgaggatgacgaaaacattctgaaactagatatggtgatggttgcacagctctgtaaatacgcgaaaacccttgaattgtacactttaaatgggtgagctttatggtatataaattatatctcaatacagtctgctttgaagaatcttgttcttgtccttgggagtttgtagcctcttttggtgtttatgtgaccttggatacttaattttctcttggctgtatggcacgcgcttgtaatcctagcactttgggaggccaaggcaggaggttcgcaggagttcgaggcaagtctcctgggcaacatggtgagactgtctctctctctctctttttttttttttttttttttgagacagactcttgctctgttgcccaggctggagtgcagtggcgcgatcttggctcactgcaacctccacctctcaggttcaagtgattcttctgcctcagcctcccgagtagctgggactacaggtgcatgccaccacaaccggctgattttttgtagttttagtagagatggggtttcaccgtattagccaggatggtctcaatctcctgaccttgtgatccacctgcctcagcctcccaaagtgctgggattacaggcatgagccactgcacccagcctttttttttttttttttgaaatggagtttcgctcttgttgcctaggctggagtgctatggcacgatctcagctcacctcaaactcagcctcctgggttcaagcgattctcctgcctcagccttccgagtagctgggattacaggcatgagccaccaggcctggctaattttgtatttttttttttttttgagacggagtctcgctctgttgcccaggccggactgcggactgcagtggcgcaatctcggctcactgcaagctccgcttcccgggttcacgccattctcctgcctcagcctcccgagtagctgggactacaggcgcccgccaccgcgcccggctaattttttgtatttttagtagagacggggtttcaccttgttagccaggatggtctcgatctcctgacctcatgatccacccgcctcggcctcccaaagtgctgggattacaggcgtgagccaccgcgcccggccaattttgtatttttattagagacagggtttctccagcctgttggtcaggctgatctcgaactcccgaccttgggtgatccgcccgccttggtctcccaaagtgctgggattacaggcgtgagccaccgcacccggccctttttttttttttttttttttaaataaaaattatttccccaacctctcatgagctcctggagtatagtagctagaccgggagcctgttccattcccttctggggcaggcactgagcctttaggctagctagaggccccatagatgaggcttggcagaaatgtgctctgagctcctgccatcagattgtcacattttgcagagtgagaggagttccagggcagtcttcctttatgtggcttattcccttcagtgatgtcctcaaaggtctagaaaggtggacctgggtatataggatgtctctcgtctccccacagcatagagctgaggttagaaaaagacggatgttttactacatgctgctctttttcactgtggcccagtcctcagaggaaacatgggtttcttattatagaaaagagagagatcagattagatggaaccaaatcccagaacttgattttcaacagattccaaggaactgtgaaccctgataaattccttggccttttttttgtctacttcaaaaattggaaaacaggtgatttggagaatatctttagattttggcagtttgaaaattaaattcagctatctagtaagtcagaaagcagaaagaggtttttttgcttctgacttttattgagatctgtttgcttttttgcattttggacagtaacgctcatatgtggaaagtgcataacaagatgaatgaaagtattagtcaatgggttggtgttttaagacactcaggatcaaaataattgttacttcatttaaaaagtattatcaaaactctctagcatattttaaaacagcagtgttagctctgataactaataatgaccactttctaataatttgatcattttctttagtgaagaactggtggctgaagcacataacctctgcaccctgctagaaaatgccatacaggacactgtgagggaacaagaccagagtttcacggtaacagcttgtgtgagactcctgcgattccatgtcctttctttctatggcaaaatagaagagaaaatggaaatgcaatctggcattatcctcaacctcagtgtttgtttgtttgcttgtttatttgtgacagggtctctctctctcacccaggctggagtgcagtggcatgatcttggctcactgcaacctccgcttcccgggttcaagtgattctcatgcctcagcctcctgagtagctgggactacaggcgtgcgtcaccacattcagctgattttttcagtgtatatttataattttctagtacacattttttattattcataataatagtgatgtctaacaattattgaaggcttacaactacatgtatgcattatcttatttaatccttggaacacttaattccgatgatgaggaggaaggtagcattgttcccagaagcctgtccccacctgcaccattggtactactgctgagtatttgtgtgttgagtgctgggctgggagcaggaaccagccatggccttgtcctcagggccttggagcttagtggtaggtagtactagttatgagaaaactagccaagttacaggtacattaagacaaagcttccattgttgagagaatcctgcatcatttgcttagatctttacatggcctttacctgctaatcacttgctaacctcccctaactttaagcttttggaagaattacaagggataccactgtgaattgcagcctttgctgatgtagtcgcatgtcctcctccagtctgtggacattctatatctcttgctgctctcctcctcctggcatgataatgttttgatcagttcattgcttacttgcatgtctgtgggaggaagaggaagtctcatcaggccaagtcatgtggtgaggctggaaatccataactgagattagctacccacagtgagcatgggagtgagtgctgtgagccacagtggtactgacatcgactttctaattcccacagtcacagaatctcaaggactctgagccaattcaaagaaaagatcctgtacagtttgaatatgtaacttagcttaagagtaccctgcagtcacaagatttattaataaaagggtttggctttttaatttgtatttgtttaatttatttgttttatgcagcctgggtcttgctatgttgcccaggctggtcttgaactcctggcctcaagcgatccgctcgcctctgcctcccaaagtgctgggactataggcatgagccaccatacccagccaataaaggggtttcaatatatttctttttattttttattttttgagatggagtcttgctcttttgcccagggtggagtgcaatggcacgatctcagctcactgcaacccctacctcccaggttcaagtgattctcctgcctcagcctcctgagtagctgggactataggagcttgccaccacgcctggctaattttgtatttttagtagaaatggggtttcaccattttggccaggctggtctcgaactcctgacctcatgatctgcccaccttggcctcccaaagtgttgggattataggcatgagccactgtgcctggctgggttttagtatatttctcaattgtcctgatttcctcctgaagaggaaaaataacctgaaatgtgttggtggctgttgtttttttaacatgtctgttgactttcaggccctagactggagctggttacagacggaagaagaagagcacagctgcctggagcaggcctcatgatgtggggggactcgaccccctgacatggggcagcccatagcaggccttgtgcggtggggggactcgaccccctgacatggggctgcctggagcaggccgcgtgacgtggggctgcctggccgcggctctcacatggtggttcctgctgcactgatggcccaggggtctctggtatccagatggagctctcgcttcctcagcagctgtgactttcacccaggacccaggacgcagccctccgtgggcactgccggcgccttgtctgcacactggaggtcctccattacagaggcccagcgcacatcgctggccccacaaacgttcaggggtacagccatggcagctccttcctctgccgtgagaaaagtgcttggagtacggtttgccacacacgtgactggacagtgtccaattcaaatctttcagggcagagtccgagcagcgcttggtgacagcctgtcctctcctgctctccaaaggccctgctccctgtcctctctcactttacagcttgtgtttcttctggattcagcttctcctaaacagacagtttaattatagttgcggcctggccccatcctcacttcctctttttatttcactgctgctaaaattgtgtttttacctactactttggtggttgtcctcttttcggcaaagttggagcgagtgccaagctctccatctgtggtcctttctgccaagagcgactcatagtaaccaggatgggagagcagctgccttattctgaatcccaaaaattacttgggggtgattgtcacagaggagggacagaaagggtatctgctgaccaccagcctgcctacccatgcccatgtctccattcctgctcaagcgtgtgtgctgggccggggagtccctgtctctcacagcatctagcagtattattaaatggattcattttaaaaatagctcctatattttgtaacatgtctcaaacactcatactgggttccacaatccactgttagaatacctatggttagggcttctgaactaaaataatggaaaattttaacaatttgtatagtgcctggatcattactagtgccataaccctgcttcttcaacatttcacagaacttctcttttatataaaggcaagagcacaaaatgagttcagatgatcacaaacaggtgagttttgttggagaagaaagttggagtaggagactttcacaagtggtttccatggagatagaatgaagcattctgtggtcaagtaagtttagggagctattcatgtttcacttgctttgtggagattcacactatgcactgggaaagtatctgaaaagtcttataataaagaaacaggcttaactttgtgtaagaacactgtttatcaatgtcatttggctatagaaacattttctcctgctgattgtgtgtgtgaaacatgtattaacattccaatgaactagcatttaataaagcacaattttggaaaccctggtaaatgacagtgggaaataacacccgaaaggcaaggacgggcagattggggagggaaaggatgttgggctaagggctgtgagcttatgttacaggcaactgagccactgaagaattttgacgaagaaaatgccaaccaaagcagtcattttaaaagtttatggctgttcagttacaggacaagttgtgaaaagaaagaaaaaaaatggaaaaaaaaaaagtttatggctgaaacagtgtaattgattaaaaagtgaaaatccaggccgggcgcggtggctcacgcctgtaattccaacactttgggaggctgaggcaggcagatcacctgaggtcgggagttcgagaccagcctgaccaatatggagaaaccccgtctctactaaaaatacaaaagccaggcgtggtgggacatgcctgtaatcccagctactcgggaggctgaggcaggagaatcgcttgaacctaggaggcagaggttgcagtgagcagagattgtgccattgcactccagcctgggcaaaaagagcgaaactttgtctcaaaaaaaaaaaaaaaaagtgaaaatccaggagttagtatgtctgcttccaaaaagattagatagatacattttttcctctcagtaagtacagctaaactccttggtcacataaacaaacacaagactctgaaaggtagagataagacggaagactatccctggaccttgggatctgaggaaggactctg

SEQ ID NO: 12 - protein, 756 aa, Homo sapiens
  v-erb-b2 erythroblastic leukemia viral oncogene homolog 2, neuro/glioblastoma derived oncogene homolog (avian) (ERBB2), isoform a
MSWSPSLTTQTCGAWEMKERLGTGGFGNVIRWHNQETGEQIAIKQCRQELSPRNRERWCLEIQIMRRLTHPNVVAARDVPEGMQNLAPNDLPLLAMEYCQGGDLRKYLNQFENCCGLREGAILTLLSDIASALRYLHENRIIHRDLKPENIVLQQGEQRLIHKIIDLGYAKELDQGSLCTSFVGTLQYLAPELLEQQKYTVTVDYWSFGTLAFECITGFRPFLPNWQPVQWHSKVRQKSEVDIVVSEDLNGTVKFSSSLPYPNNLNSVLAERLEKWLQLMLMWHPRQRGTDPTYGPNGCFKALDDILNLKLVHILNMVTGTIHTYPVTEDESLQSLKARIQQDTGIPEEDQELLQEAGLALIPDKPATQCISDGKLNEGHTLDMDLVFLFDNSKITYETQISPRPQPESVSCILQEPKRNLAFFQLRKVWGQVWHSIQTLKEDCNRLQQGQRAAMMNLLRNNSCLSKMKNSMASMSQQLKAKLDFFKTSIQIDLEKYSEQTEFGITSDKLLLAWREMEQAVELCGRENEVKLLVERMMALQTDIVDLQRSPMGRKQGGTLDDLEEQARELYRRLREKPRDQRTEGDSQEMVRLLLQAIQSFEKKVRVIYTQLSKTVVCKQKALELLPKVEEVVSLMNEDEKTVVRLQEKRQKELWNLLKIACSKVRGPVSGSPDSMNASRLSQPGQLMSQPSTASNSLPEPAKKSEELVAEAHNLCTLLENAIQDTVREQDQSFTALDWSWLQTEEEEHSCLEQAS

SEQ ID NO: 13 - DNA, 2768 bp, Homo sapiens
  v-erb-b2 erythroblastic leukemia viral oncogene homolog 2, neuro/glioblastoma derived oncogene homolog (avian) (ERBB2), transcript variant 2
ccgaggcgctccctgggatcacatggtacctgctccagtgccgcgtgcggcccgggaaccctgggctgctggcgcctgcgcagagccctctgtcccagggaaaggctcgggcaaaaggcggctgagattggcagagtgaaatattactgccgagggaacgtagcagggcacacgtctcgcctctttgcgactcggtgccccgtttctccccatcacctacttacttcctggttgcaacctctcttcctctgggacttttgcaccgggagctccagattcgctaccccgcagcgctgcggagccggcaggcagaggcaccccgtacactgcagagacccgaccctccttgctaccttctagccagaactactgcaggctgattccccctacacactctctctgctcttcccatgcaaagcagaactccgttgcctcaacgtccaacccttctgcagggctgcagtccggccaccccaagaccttgctgcagggtgcttcggatcctgatcgtgagtcgcggggtccactccccgcccttagccagtgcccagggggcaacagcggcgatcgcaacctctagtttgagtcaaggtccagtttgaatgaccgctctcagctggtgaagacatgacgaccctggactccaacaacaacacaggtggcgtcatcacctacattggctccagtggctcctccccaagccgcaccagccctgaatccctctatagtgacaactccaatggcagcttccagtccctgacccaaggctgtcccacctacttcccaccatcccccactggctccctcacccaagacccggctcgctcctttgggagcattccacccagcctgagtgatgacggctccccttcttcctcatcttcctcgtcgtcatcctcctcctccttctataatgggagcccccctgggagtctacaagtggccatggaggacagcagccgagtgtcccccagcaagagcaccagcaacatcaccaagctgaatggcatggtgttactgtgtaaagtgtgtggggacgttgcctcgggcttccactacggtgtgcacgcctgcgagggctgcaagggctttttccgtcggagcatccagcagaacatccagtacaaaaggtgtctgaagaatgagaattgctccatcgtccgcatcaatcgcaaccgctgccagcaatgtcgcttcaagaagtgtctctctgtgggcatgtctcgagacgctgtgcgttttgggcgcatccccaaacgagagaagcagcggatgcttgctgagatgcagagtgccatgaacctggccaacaaccagttgagcagccagtgcccgctggagacttcacccacccagcaccccaccccaggccccatgggcccctcgccaccccctgctccggtcccctcacccctggtgggcttctcccagtttccacaacagctgacgcctcccagatccccaagccctgagcccacagtggaggatgtgatatcccaggtggcccgggcccatcgagagatcttcacctacgcccatgacaagctgggcagctcacctggcaacttcaatgccaaccatgcatcaggtagccctccagccaccaccccacatcgctgggaaaatcagggctgcccacctgcccccaatgacaacaacaccttggctgcccagcgtcataacgaggccctaaatggtctgcgccaggctccctcctcctaccctcccacctggcctcctggccctgcacaccacagctgccaccagtccaacagcaacgggcaccgtctatgccccacccacgtgtatgcagccccagaaggcaaggcacctgccaacagtccccggcagggcaactcaaagaatgttctgctggcatgtcctatgaacatgtacccgcatggacgcagtgggcgaacggtgcaggagatctgggaggatttctccatgagcttcacgcccgctgtgcgggaggtggtagagtttgccaaacacatcccgggcttccgtgacctttctcagcatgaccaagtcaccctgcttaaggctggcacctttgaggtgctgatggtgcgctttgcttcgttgttcaacgtgaaggaccagacagtgatgttcctaagccgcaccacctacagcctgcaggagcttggtgccatgggcatgggagacctgctcagtgccatgttcgacttcagcgagaagctcaactccctggcgcttaccgaggaggagctgggcctcttcaccgcggtggtgcttgtctctgcagaccgctcgggcatggagaattccgcttcggtggagcagctccaggagacgctgctgcgggctcttcgggctctggtgctgaagaaccggcccttggagacttcccgcttcaccaagctgctgctcaagctgccggacctgcggaccctgaacaacatgcattccgagaagctgctgtccttccgggtggacgcccagtgacccgcccggccggccttctgccgctgcccccttgtacagaatcgaactctgcacttctctctcctttacgagacgaaaaggaaaagcaaaccagaatcttatttatattgttataaaatattccaagatgagcctctggccccctgagccttcttgtaaatacctgcctccctcccccatcaccgaacttcccctcctcccctatttaaaccactctgtctcccccacaaccctcccctggccctctgatttgttctgttcctgtctcaaatccaatagttcacagctgagctggg

SEQ ID NO: 14 - protein, 614 aa, Homo sapiens
  v-erb-b2 erythroblastic leukemia viral oncogene homolog 2, neuro/glioblastoma derived oncogene homolog (avian) (ERBB2), isoform b
MTTLDSNNNTGGVITYIGSSGSSPSRTSPESLYSDNSNGSFQSLTQGCPTYFPPSPTGSLTQDPARSFGSIPPSLSDDGSPSSSSSSSSSSSSFYNGSPPGSLQVAMEDSSRVSPSKSTSNITKLNGMVLLCKVCGDVASGFHYGVHACEGCKGFFRRSIQQNIQYKRCLKNENCSIVRINRNRCQQCRFKKCLSVGMSRDAVRFGRIPKREKQRMLAEMQSAMNLANNQLSSQCPLETSPTQHPTPGPMGPSPPPAPVPSPLVGFSQFPQQLTPPRSPSPEPTVEDVISQVARAHREIFTYAHDKLGSSPGNFNANHASGSPPATTPHRWENQGCPPAPNDNNTLAAQRHNEALNGLRQAPSSYPPTWPPGPAHHSCHQSNSNGHRLCPTHVYAAPEGKAPANSPRQGNSKNVLLACPMNMYPHGRSGRTVQEIWEDFSMSFTPAVREVVEFAKHIPGFRDLSQHDQVTLLKAGTFEVLMVRFASLFNVKDQTVMFLSRTTYSLQELGAMGMGDLLSAMFDFSEKLNSLALTEEELGLFTAVVLVSADRSGMENSASVEQLQETLLRALRALVLKNRPLETSRFTKLLLKLPDLRTLNNMHSEKLLSFRVDAQ

SEQ ID NO: 15 - DNA, 1212 bp, Homo sapiens
  fibroblast growth factor receptor 1 (fms-related tyrosine kinase 2, Pfeiffer syndrome) (FGFR1)
ggacgattgccgctgcagccgccgccccactcacctccggtgtgtctgcagcccggacactaagggagatggatgaatgggtggggaggatgcggcgcacatggccccgggcggctcggcggtcagctgccgcccccacagcggaccggtcggggcgggggtcgggcggtagaaaaaagggccgcgaggcgagcggggcactgggcggaccgcggcggcagcatgagcggcgcagaccgtagccccaatgcgggcgcagcccctgactcggccccgggccaggcggcggtggcttcggcctaccagcgcttcgagccgcgcgcctacctccgcaacaactacgcgccccctcgcggggacctgtgcaacccgaacggcgtcgggccgtggaagctgcgctgcttggcgcagaccttcgccaccggtgaagtgtccggacgcaccctcatcgacattggttcaggccccaccgtgtaccagctgctcagtgcctgcagccactttgaggacatcaccatgacagatttcctggaggtcaaccgccaggagctggggcgctggctgcaggaggagccgggggccttcaactggagcatgtacagccaacatgcctgcctcattgagggcaagggggaatgctggcaggataaggagcgccagctgcgagccagggtgaaacgggtcctgcccatcgacgtgcaccagccccagcccctgggtgctgggagcccagctcccctgcctgctgacgccctggtctctgccttctgcttggaggctgtgagcccagatcttgccagctttcagcgggccctggaccacatcaccacgctgctgaggcctggggggcacctcctcctcatcggggccctggaggagtcgtggtacctggctggggaggccaggctgacggtggtgccagtgtctgaggaggaggtgagggaggccctggtgcgtagtggctacaaggtccgggacctccgcacctatatcatgcctgcccaccttcagacaggcgtagatgatgtcaagggcgtcttcttcgcctgggctcagaaggttgggctgtgagggctgtacctggtgccctgtggcccccacccacctggattccctgttctttgaagtggcacctaataaagaaataataccctgccaaaaaaaaaaaaaaaaaaaaaaaaaaaaaaaaaaaaaaaaaaaaaaaaaaaaaaa

SEQ ID NO: 16 - protein, 282 aa, Homo sapiens
  fibroblast growth factor receptor 1 (fms-related tyrosine kinase 2, Pfeiffer syndrome) (FGFR1)
MSGADRSPNAGAAPDSAPGQAAVASAYQRFEPRAYLRNNYAPPRGDLCNPNGVGPWKLRCLAQTFATGEVSGRTLIDIGSGPTVYQLLSACSHFEDITMTDFLEVNRQELGRWLQEEPGAFNWSMYSQHACLIEGKGECWQDKERQLRARVKRVLPIDVHQPQPLGAGSPAPLPADALVSAFCLEAVSPDLASFQRALDHITTLLRPGGHLLLIGALEESWYLAGEARLTVVPVSEEEVREALVRSGYKVRDLRTYIMPAHLQTGVDDVKGVFFAWAQKVGL

SEQ ID NO: 17 - DNA, 3012 bp, Homo sapiens
  farnesyltransferase, CAAX box, alpha (FNTA), transcript variant 1
gaagaaagaagagtttcctttcgtatcgcttaggggttcctcgcaagaaccatctgacagagaaaagccctggctcccgccccagtggcttctaattctggtccccgcgcccagaaagccgggaacgggcaagcctggaaaggcgttttgaaaggaaacaggatcccccgagtataggatgcgtttctgcctcacaaaagtcccttgggggtggggggacggcagcggctgaggcgcaggaaagaggagagcacacggggagtggcccttggaaccaggcgcgcaaaacctcagcccctaggctccatttccaggttcgcgggtgacctccccaagatggccgccgcctgggggcgggcctccacgctgcacgggtgttgattgggtgagacgactcaatggtgagcaatgattggttcacacggcgcaagctgggcggaaccggaagatggtgtgagccacgggctgccgggggcctggggctcggcgtcggtccccgggggatgtggagagctggcagcatgtcggccgagctgggagtcgggtgcgcattgcgggcggtgaacgagcgcgtgcagcaggctgtggcgcggcggccgcgggatctcccagccatccagccccggctagtggcggtcagcaaaaccaaacctgcagacatggtgatcgaggcctatggacatgggcagcgcacttttggcgagaactacgttcaggaactgctagaaaaagcatcaaatcccaaaattctgtctttgtgtcctgagatcaaatggcacttcattggccacctacagaaacaaaatgtcaacaaattgatggctgtccccaatctcttcatgctggaaacagtggattctgtgaagttggcagacaaagtgaacagttcctggcagagaaaaggttctcctgaaaggttaaaggttatggtccagattaacaccagcggagaagagagtaaacatggccttccaccttcagagaccatagccatcgtggagcacataaacgccaagtgtcctaacctggagtttgtggggctgatgaccataggaagctttgggcatgatcttagtcaaggaccaaatccagacttccagctgttattgtccctccgggaggagctgtgtaaaaagctgaacatccctgctgaccaggttgagctgagcatgggcatgtccgcggatttccagcatgcggttgaagtaggatctacaaatgtccgaataggaagcacgatttttggagagcgggattactcaaagaaacccaccccggacaagtgcgcagcagacgtgaaggccccgctggaggtggcacaggagcactgagccagggaatactgagagcactaactatgcactaacctagattttcatttcgatattccctgtgtcccagcgcagtcctgctctcctgtgacctgtggagagcactaatgatcacgtgtgttgatggaaaccatctgtgcttagtctctgacataggaagcttgcttcaggcaatggctttggattgagtttgagaaattcaaacatttctgcagaacagataccaaatcaatagctaggaatcatgttcaatattgaattctgcccaggagcatgaactgatccatgaatgccttttccaggttaaaatttggtcactgatgcctataatcgtggaagtcagagggattcccctttttcatctcattttaataggaaaattccttatggttaacatctccctacaaactcctactacgtcgtctaaattgctgctctggaataaggtgatttctgcccccagattcttccctagccggtagatacgtgaagatattcccaactgtggaatggcagtgtaggtagcttcaggaaatggctcaggttaattctcaaaacacaaattgttgctggccaggcatggtgactcatgcctgtaatcccagcaatttgggagacagaggcggaaggatcacctgagcctaggagttcaagaccagcctcagcaacagcaggagccccaccccccgtctctacaaaaaaatttaaaaattaactgggcatggtggctgaggtggaagaatggaagaatcacttgagcccaggagtttgaggctgcagtgagctatgattgcaccactgtactcctgccttaaaaaaaaaaaaaaaatcccaatagtccatgaaggctttgatctcttgggaagttcttcatagatgctgtcacatttcttaaagcaaccttttaatatgcagataataccccccaacttttttagagacagcctgtctcttaaaaaaaaaattaatttggtagtgagagcttgtgtcactgccactctgttttatccctgaaattaaaggataacataaggaggacttgggcctttctgacatcatcctgaagagacaggactttgcgtttttcctctgggacctacagtgatgagaatttaatgattatctcctccactataatcctctttagggtgattttttaaatcaaaacccagtgaatctcattactcctaagaaacgaaagattccttcaaagccttttcaggcacatggtttcaacaaagcctggctttgacattccttgtcctgaggagcactttccaggcatagttacagcttccccactgtatttacaagccagaattgtgcaactcttctggatcattaataaagtagcaagatcctcaaaaaacccaaaaacaccattctctaatagtcatgacaaatggcttcagtatggcttgttttttattttccagatggctttttctcttattttttgaagccccagtctttgattttacaggtaactttcaaaacatcatgatgctgccaaatgtacttttgtaaacttaaacattatgattcctgtattatttcagtgagagctacagtgtgatatttcagagtctattaaataaaaatgtgagtttgaattacaccatctgtgccaattacaaagcaattaaaagatttattttttatgaaaaaaaaaaaaaaaaaa

SEQ ID NO: 18 - protein, 275 aa, Homo sapiens
  farnesyltransferase, CAAX box, alpha (FNTA), isoform a
MWRAGSMSAELGVGCALRAVNERVQQAVARRPRDLPAIQPRLVAVSKTKPADMVIEAYGHGQRTFGENYVQELLEKASNPKILSLCPEIKWHFIGHLQKQNVNKLMAVPNLFMLETVDSVKLADKVNSSWQRKGSPERLKVMVQINTSGEESKHGLPPSETIAIVEHINAKCPNLEFVGLMTIGSFGHDLSQGPNPDFQLLLSLREELCKKLNIPADQVELSMGMSADFQHAVEVGSTNVRIGSTIFGERDYSKKPTPDKCAADVKAPLEVAQEH

SEQ ID NO: 19 - DNA, 1059 bp, Homo sapiens
  inhibitor of kappa light polypeptide gene enhancer in B-cells, kinase beta (IKBKB)
tgtacaaaaaagctggcaccatggctcagttgggagcagttgtggctgtggcttccagtttcttttgtgcatctctcttctcagctgtgcacaagatagaagagggacatattggggtatattacagaggcggtgccctgctgacttcgaccagcggccctggtttccatctcatgctccctttcatcacatcatataagtctgtgcagaccacactccagacagatgaggtgaagaatgtaccttgtgggactagtggtggtgtgatgatctactttgacagaattgaagtggtgaacttcctggtcccgaacgcagtgtatgatatagtgaagaactatactgctgactatgacaaggccctcatcttcaacaagatccaccacgaactgaaccagttctgcagtgtgcacacgcttcaagaggtctacattgagctgtttgatcagattgatgaaaatctcaaactggctttgcaacaggacctgacctccatggcccctgggctggtcattcaagctgtgcgggtaacaaagcccaacataccagaggcaatccgcagaaactacgagttgatggaaagtgagaagacaaagcttctcattgccgcccagaaacagaaggtggtggaaaaggaagcagagacagagcggaagaaggcgctcattgaggcagaaaaagtggcccaggtggctgagatcacctacgggcagaaggtgatggagaaggagactgagaagaagatttcagaaattgaagatgctgcatttctggcccgggagaaggcaaaggcagatgctgagtgctacactgctatgaaaatagccgaagccaataagctgaagctaacccctgaatatctgcagctgatgaagtacaaggccattgcttccaacagcaagatttactttggcaaagacattcctaacatgttcatggactctgcgggcagtgtgagcaagcagtttgaggggctagctgacaagctaagctttggcttagaagatgaacccttggagacggccactaaggagaatggcgacccagctttcttgtaca

SEQ ID NO: 20 - protein, 339 aa, Homo sapiens
  inhibitor of kappa light polypeptide gene enhancer in B-cells, kinase beta (IKBKB)
MAQLGAVVAVASSFFCASLFSAVHKIEEGHIGVYYRGGALLTSTSGPGFHLMLPFITSYKSVQTTLQTDEVKNVPCGTSGGVMIYFDRIEVVNFLVPNAVYDIVKNYTADYDKALIFNKIHHELNQFCSVHTLQEVYIELFDQIDENLKLALQQDLTSMAPGLVIQAVRVTKPNIPEAIRRNYELMESEKTKLLIAAQKQKVVEKEAETERKKALIEAEKVAQVAEITYGQKVMEKETEKKISEIEDAAFLAREKAKADAECYTAMKIAEANKLKLTPEYLQLMKYKAIASNSKIYFGKDIPNMFMDSAGSVSKQFEGLADKLSFGLEDEPLETATKEN

SEQ ID NO: 21 - DNA, 1978 bp, Homo sapiens
  nuclear receptor subfamily 1, group D, member 1 (NR1D1)
cgggggtgcaaccctttgaagtgtcccctcctacttcttgctgcctcacggttgctgttgcagacccaggagtctctgaaggcttccgcggctttggggccggttgtgagatgccaggcagaggccgctgcccggactgcggctccacggagctggtggaagactcgcactattcgcagagccagctggtgtgctccgactgcggctgcgtggtcaccgagggggtccttaccactaccttcagcgacgagggcaatctccgagaggtaacatattcccgaagcacaggggaaaacgaacaagttagtcgcagccagcaacgaggtctccggcgagtgagagacctttgtcgagttctgcagttgccaccaacatttgaggataccgcggttgcctactaccaacaggcatatcggcactctggcatccgagcggccaggctgcaaaagaaggaggtgttggttgggtgctgcgtcttaatcacctgccgacagcataactggcccctaacaatgggggccatctgcacgctgttgtatgcagatttggatgtgttttctagcacttacatgcagatagtgaagctcctgggactggatgtgccatctctgtgcttggcagaactggtgaagacctattgcagcagcttcaaactgttccaagcttcaccttctgtgccagccaaatacgtggaagacaaagagaagatgctgtctcgaacaatgcagttggtggagctggcaaatgagacgtggctggtgaccgggaggcatcccttgcccgtcatcactgctgcgactttcctggcttggcagtcgctgcagcctgcagatcggctttcatgttcccttgcccgattttgtaaattggcaaatgtggacctgccctacccggcgtcctcccgcctgcaggagctgctggctgtgctgctgcggatggctgagcagctggcctggttacgagttctgagacttgacaaacggtctgtggtgaagcacatcggtgaccttctccagcaccgccagtcactggtccgctctgcctttcgggatgggacagcagaagtggagacccgagagaaggagccaccggggtggggacaggggcaaggagaaggggaggtgggaaataattccttaggtttaccccaggggaagcggccggccagtcctgcccttctcttgccaccctgcatgttgaagtccccgaagcggatctgccctgtaccccctgtctccactgtcactggagatgagaacatttctgatagtgaaatagaacagtatttgcgtacccctcaggaagttagggactttcagagagcccaggctgctagacaggctgccacgagtgtccctaaccctccctgatggatatccactgggagcacttcatcctgttctgacagcttgataacattcctgttataaccaaggatggaagtgtacaccagtccgtaggtattgcttttcttgtttgaaggaaccaagaggggctctgccattagttggaccctgggtcctggagtaaagtcaggagtgcagggatgactataggtaggagagattcccatcccttggtgtgggagagcaagttgcctatgtccatgttctgtgagatggctttcctcatagatggatgggaaaatgtcaggctctttgctgctggtttgaattggacacactgctgcggctcctcctgcaggcctgagggggcttccctctgcttgtggagtggttggcattcccagcagtatcaaccctcagaggagcgggaactggggaattctggccctacgtgcattcacaggcaatgatgggtttgtgtgtatggtgtcatgagatcctctacctcataacaaaaggacagtgggtagactaaggcagtagctcaaagggctttgcaaaattttaatatattaaaacaagaggcatctgctagaaaacattctattgtataaaacccgagttcttaaaaa

SEQ ID NO: 22 - protein, 419 aa, Homo sapiens
  nuclear receptor subfamily 1, group D, member 1 (NR1D1)
MPGRGRCPDCGSTELVEDSHYSQSQLVCSDCGCVVTEGVLTTTFSDEGNLREVTYSRSTGENEQVSRSQQRGLRRVRDLCRVLQLPPTFEDTAVAYYQQAYRHSGIRAARLQKKEVLVGCCVLITCRQHNWPLTMGAICTLLYADLDVFSSTYMQIVKLLGLDVPSLCLAELVKTYCSSFKLFQASPSVPAKYVEDKEKMLSRTMQLVELANETWLVTGRHPLPVITAATFLAWQSLQPADRLSCSLARFCKLANVDLPYPASSRLQELLAVLLRMAEQLAWLRVLRLDKRSVVKHIGDLLQHRQSLVRSAFRDGTAEVETREKEPPGWGQGQGEGEVGNNSLGLPQGKRPASPALLLPPCMLKSPKRICPVPPVSTVTGDENISDSEIEQYLRTPQEVRDFQRAQAARQAATSVPNPP

SEQ ID NO: 23 - DNA, 7839 bp, Homo sapiens
  phenylethanolamine N-methyltransferase (PNMT)
agtcgcggcgatcttctcctcgcttctggagtgttatcgtcaccatgtccctaatggtctcggctggccggggcctgggggccgtgtggtccccaacccacgtgcaggtgacggtgctgcaggcgcggggcctgcgggccaagggccccgggggcacgagcgacgcgtacgcggtgatccaggtgggcaaggagaagtacgccacctccgtgtcggagcgcagcctgggcgcgcccgtgtggcgcgaggaggccaccttcgagctgccatcgctgctgtcctccggacccgcggccgccgccaccctgcagctcaccgtgctgcaccgcgcgctgctcggcctcgacaagttcctgggccgcgccgaggtggacctgcgggatctgcaccgcgaccagggccgcaggaagacgcagtggtataagttgaaatccaaaccaggaaagaaggacaaggagcgaggagaaattgaggttgacatccagtttatgagaaacaacatgactgccagcatgtttgacctttctatgaaagacaagtctcggaatccatttggaaagctgaaggacaagatcaaggggaagaataaggacagtgggtcagacaccgcctccgccatcatccctagcacgacaccttcggtcgacagtgatgatgagtctgtggttaaagacaagaaaaagaaatcaaagatcaagaccttactttccaagtcaaatttgcagaagacgcctctttcccagtccatgtctgtcctgccgacttcaaagccagaaaaagtgctgcttcgtcccggagactttcagtcccagtgggatgaagatgacaatgaggatgagtcctcctcggcctcggatgtcatgtctcacaagagaacagcgagtacggatcttaagcaactgaaccaggtcaactttacccttcccaagaaggaaggactttcctttcttggtggccttcggtctaagaatgatgtcctttcccgctctaatgtctgcatcaatgggaaccatgtttacctggagcagccagaagccaagggtgagatcaaggatagcagcccgtcctcctccccatcccccaagggcttcagaaagaagcatttgttctcttctacagagaacctggcggctgggtcttggaaggagcctgctgaaggaggtgggctgtcttctgacaggcagctctccgaatcttccaccaaggactccttgaagtctatgaccctgccgtcctaccgacctgccccactggtcagtggggacctcagggaaaacatggcccccgcaaactcagaggccacaaaagaagctaaggagagcaagaagccagagagcaggaggtcctctttgctgtctctgatgacggggaagaaggatgtggctaagggcagtgaaggtgaaaaccctctcacggtcccagggagggagaaggaaggcatgctgatgggggttaagccgggggaggacgcatcggggcctgctgaagaccttgtgagaagatctgagaaagatactgcagctgttgtctccagacagggcagctccctgaacctctttgaagatgtgcagatcacagaaccagaagctgagccagagtccaagtctgaaccgagacctccaatttcctctccgagggctccccagaccagagctgtcaagccccgactggaagtgtctccagaggcgcaacccacagccaggcttccttcccctactgactccccttcctctcttcctcctcttccttctagctctggccaggcatctgtcccctctgaattgggacatggtgcagacacacagtcctctgagagtccttctgtcttctcctctctctcatctcccatagcagctcccatttccacatccactccaattgaaagctggcctctcgtagacaggggccaggccaagtctgaaggaccacccttgctccctaaggcagagttgcaaactgagagtttaacaccggttccaaattctggttcttctgtcctgggatcacttttcaaacagccatcctttccagcaaataaagggacagaagattctctgatgggcaggacccgtgagacaggcacagagaagaacaccagcagccttgagttggaggagtctctcccagagcagcctgaaacagggcgacaagaggaagaacttccgagattcccctgcaaaaaacaagactacagcccatcatctggagaagcccaggaagtaccgtttgccctttcactcagcagtgatggagctgtgagccctgttggggagcttgcagcaggaggagacagagacttggagagtcaggctgggtctcttgtggagagcaaagccagggatgcagctgaagaagtggcgccccctcttcccatgggagcatcagtcccttccattgattccatgatgcggaagctggaagagatgggtctgaacctccgcaaggaccagaagaaaaccaagaagcgtgtgtcattttctgagcagctcttcacggaagaggcagtggcgggggctgccttgctggtggaaggacacagcagttgtccccaggagctgaaccctgcatggtctgttgctggaaacgcgtctgacggagagcctcctgagtctccccacgcagaggactcagaaagggaatcggtgaccacacctgggccagcgacgtgtggtgcgccagcctccccagcggatcacctcctcctcccctcccaggaggagagtttctccgaagtccccatgagtgaagcaagctcagcgaaagacactccactctttaggatggagggagaggatgcccttgtgactcagtatcagagcaaagccagtgaccacgaaggtttattgtctgaccccttgagtgaccttcagttggtctcagattttaaatctccaatcatggccgatctgaacttaagccttccttccattcctgaagtcgcatcggatgatgaaagaatagatcaggttgaagatgacggagatcaggttgaagatgatggagagacagcaaagtcgtcaactctggacataggagctttgtccttgggcttggtagtcccctgtcctgagaggggaaaggggcccagtggcgaggcagataggttggtactgggggagggcctgtgtgatttcaggctgcaagcaccccaggcatctgtgacagctccttcagagcagaccacagagttcggaattcacaaaccacatcttggcaagagctcaagcttggataaacagctgccaggccccagtggtggtgaggaagaaaaaccgatgggaaatgggagtccaagcccgcctcctggcacatccctggacaatcctgtacccagcccctccccttctgagatctttcctgtcacacactctttccccagctctgcacattctgacactcaccacaccagcacagcagaatctcaaaaaaaagccacagcagagggctccgctggtagagttgaaaattttggcaagaggaagccactcctccaggcctgggtctcaccctcggagacacatccagtctcagctcagccaggcgctggaactgggtcagccaagcacagacttcatcctgtgaagccaatgaatgccacggccaccaaggttgctaactgcagcttgggaactgccaccatcatcagtgagaacttgaacaatgaggtcatgatgaagaaatacagcccctcggaccctgcatttgcatatgcgcagctgacccacgatgagctgattcagctggtcctcaaacagaaggaaacgataagcaagaaggagttccaggtccgcgagctggaagactacattgacaacctgcttgtcagggtcatggaagaaacccccaatatcctccgcatcccgactcaggttggcaaaaaagcaggaaagatgtaaatcagcagaaaaaaaacaccgagacgtttctgtgacttcactttcacctgctccaggggtcaaggacttgccttgcctgataaccagccagcaggctccgaatcaccatctccctcacatgttatccggcaagagtgaattctaccaatggaagccaggttaatgattacaattaatcttttactgtacattcccaaggctttagttttaaatgccactgtgcctttaacaaggttgtaaatattttatgcccaccagagatgtggtcataagatctgatcctgagccagagattcagatggcacaggaagtattcgtgtattttaacactggggttttctttctttcatactgagattttttttcagtatgtatcctccagctcttaaagcttacctgagaaagctttaaatgagaaaaggaccatgcgattggtgctgtgttacatacacatactttcttggcttctgagtagctcaggtgtggcttttggctgcagatgttaaattttgataccatgtaaacctacccagcttctcagacttgggtcttgttttttgatgggaacagaggtgtttagagaaagcctctgagtatgcctttcagattttgaacaagcggccttttctaaacatcgacttctactactctctagccttaaaataccttctgcttagatccagggcccttctactggagataggaaaagtagaattcaggaattaaaagaattactctttattcaatttgaggaacttggtgaaagcccctcctcttatgacagccaggttcctgctggctagaccagcctattcagcgctttgctaggggattgggtggtccacgcactcgctaatacagttctccaggtgtggaatgatgtcaatacgattgcttggccttttccccctgtgcctttgctcggtgctctggtttcctcagcaacactccttgtaaggggcagagacagggtccaccaactccccaagatgaagaagccccttcaggccagtcgtggtggctcatgcctgtaatcccagcactttgcaaggccgaggagggtggatcacttgaggtcaggagttcgagaccagcctgaccaacatggcgaaaccccatctctactaaaaatacaaaaattagcttggcatggtggtgcgtgcctgtaatcccagctactcgggaggctggggcaggagaattgcttgaacttgggagatggaggctgcagcgagccaagatcgtgccactgcactccagcctgggcaagagtttttttaagactcttaaaaaaagagcctgggcaatttttttaagactctgtcttaaaaaaaactaaaaagaaaaaaagaagccccttcactctacaggggacaggagaccatggattggaccccaaagggattgaactgcatctgcatgtctgtcctttgaacactttctctccctgcccaaaaggaaacccaaattatttgtgggatactggggaaattgtagtgaagggcttaatgtagttaataaaagttaaaagtcagtagaaaacaggtgcctcagccttcaaatggttgctttttttccattttccctcatgaatagactcaccagcattttacccccttgttataaaactgtgcagagcaagaagatgatacttatttttgaatttgtatttttaaaactagatttatagactttttttttttttaactagggcacttgcttccttcttagctaaaagcaccagctgagatttttcaggtaattttgttgttactcacttaagactggaattagaatgtttctggtatttctcatttttttccctggctatgatagaatctcatctaatcttgacatctctcctaggggaagaatatcacaggctaatagcgtggttgggggtgaagatgatagcagttattaaatcaggaatctcttttatgtatgtccttgttacattgaggttaagagacaaaatcattggcagtgcaatctctttccaggatttcgtttgctgtggcattggttatatcagagcactttaatctgaaggatgatactgtaacttgatttatctaattagcttttaattatctacagctattttattttatttaattctctcctacagtactgggaccactgtaaacttctcagatgacttgtatttttgtagtgctatgaaatttatttacatacttataaagaaaactgtatgttcacttgaactctgaaaatgtacatgtatggctggacgcggtggctcacgcctgtaatcccagcactttgggaggctgaggcgggtgaatcacttgattgaggtcaggagttcgagaccagcctggccaacatggcaaaaccccgtctctactaaaaaatacagaaattagctgggtgtggtggcagacagctgtaatctcagctgctcgggaggctgaggcacaagaatcgcttgagccagggaggtggaggttgcagtgagctgagatcacatcattgcactccagcctgggcaacgggcgagactctgtctcaaaaaaaagaaagaaagaaaaggtacatgtatatatttgtcctgcattatgttttttacttgatataaatgtatttttactgtgatagtccaagtgccctggggggcaggtgtgctctatgtggttcttcttccattggagagctggcgtagagatctgcagtgttcacaaggatgttggtttggagatgtctgctgctaggacctggggtgtgtgactcagtccatatgagagggacatctgggtggaggagtaaattcctgtgctctgaaatgccacttggtagctctggacaatgaaggacaattgactcaagggtgcctggcttctgctgctgctgggaaaaaattcagtttatagcattcctgcacctcccaaagtagataacctggaggtcattcagttaacaactgtccctgaggactcagttttgggggaggggttatctgggagaagctttagcctgttctgagccattaggagacattagtgaattggagcactggagaatcctacaaatggcctatgtctcagaagagctgggacctccttccagctgctgcagatgctgacaggccctgggaggctgctgtgctctggagaagctggagcagctcatttcttggcctagcctggctgcctcagaaagagcagtcaggacttgagggaagcatcaaattctatacccataaactgcagttggaagtcagctttttgaaatgtccagcctttgcccaattgtttcagatcatctcattcctcaggctttggcaggtatcctgccctccatcttattccagtgtgttcacctcatcaaggcagcagagtggatgaaggagtaagtctgccctttgccatactgaacagctgtggaccccgattggtgagggctctgcatatgcctgtatgaaggagatacaggtgtgtgtgcacatgccggtatgaagaagacacaggcatgtgcttctcagttttgctaacagtgggagctcaacggggcagagggaggaaggtccatgatgctcagccacatactgtagagagaggcaatttaatgttaaatgacgcaccatcctccctcccacccttctcccagtcaactttttttctttttctagaactactaattatctctcaaggctgaaaaattaattgccttaggtggagaacttaattcctagtatccaccaaacttaactccgtatctccatatggtgtctccatatctactgtgtgagctacttaactgacgccctcttcctccaactgaaggatcgcccaacgtttttggattatagaattattatttcctgctttctttctttgggacttttgaatttctttggtttcgtttttaagaagtaacccaacatttcctacaacactaaataaaatggtacttacctttc

SEQ ID NO: 24 - protein, 1283 aa, Homo sapiens
  phenylethanolamine N-methyltransferase (PNMT)
MSLMVSAGRGLGAVWSPTHVQVTVLQARGLRAKGPGGTSDAYAVIQVGKEKYATSVSERSLGAPVWREEATFELPSLLSSGPAAAATLQLTVLHRALLGLDKFLGRAEVDLRDLHRDQGRRKTQWYKLKSKPGKKDKERGEIEVDIQFMRNNMTASMFDLSMKDKSRNPFGKLKDKIKGKNKDSGSDTASAIIPSTTPSVDSDDESVVKDKKKKSKIKTLLSKSNLQKTPLSQSMSVLPTSKPEKVLLRPGDFQSQWDEDDNEDESSSASDVMSHKRTASTDLKQLNQVNFTLPKKEGLSFLGGLRSKNDVLSRSNVCINGNHVYLEQPEAKGEIKDSSPSSSPSPKGFRKKHLFSSTENLAAGSWKEPAEGGGLSSDRQLSESSTKDSLKSMTLPSYRPAPLVSGDLRENMAPANSEATKEAKESKKPESRRSSLLSLMTGKKDVAKGSEGENPLTVPGREKEGMLMGVKPGEDASGPAEDLVRRSEKDTAAVVSRQGSSLNLFEDVQITEPEAEPESKSEPRPPISSPRAPQTRAVKPRLEVSPEAQPTARLPSPTDSPSSLPPLPSSSGQASVPSELGHGADTQSSESPSVFSSLSSPIAAPISTSTPIESWPLVDRGQAKSEGPPLLPKAELQTESLTPVPNSGSSVLGSLFKQPSFPANKGTEDSLMGRTRETGTEKNTSSLELEESLPEQPETGRQEEELPRFPCKKQDYSPSSGEAQEVPFALSLSSDGAVSPVGELAAGGDRDLESQAGSLVESKARDAAEEVAPPLPMGASVPSIDSMMRKLEEMGLNLRKDQKKTKKRVSFSEQLFTEEAVAGAALLVEGHSSCPQELNPAWSVAGNASDGEPPESPHAEDSERESVTTPGPATCGAPASPADHLLLPSQEESFSEVPMSEASSAKDTPLFRMEGEDALVTQYQSKASDHEGLLSDPLSDLQLVSDFKSPIMADLNLSLPSIPEVASDDERIDQVEDDGDQVEDDGETAKSSTLDIGALSLGLVVPCPERGKGPSGEADRLVLGEGLCDFRLQAPQASVTAPSEQTTEFGIHKPHLGKSSSLDKQLPGPSGGEEEKPMGNGSPSPPPGTSLDNPVPSPSPSEIFPVTHSFPSSAHSDTHHTSTAESQKKATAEGSAGRVENFGKRKPLLQAWVSPSETHPVSAQPGAGTGSAKHRLHPVKPMNATATKVANCSLGTATIISENLNNEVMMKKYSPSDPAFAYAQLTHDELIQLVLKQKETISKKEFQVRELEDYIDNLLVRVMEETPNILRIPTQVGKKAGKM

SEQ ID NO: 25 - DNA, 2380 bp, Homo sapiens
  proline synthetase co-transcribed homolog (bacterial) (PROSC)
gtgatggcggcggcaggagcaggacctggccaggaagcgggtgccgggcctggcccaggagcggtcgcaaatgcaacaggggcagaagagggggagatgaagccggtggcagcgggagcagccgctcctcctggagaggggatctctgctgctccgacagttgagcccagttccggggaggctgaaggcggggaggcaaacttggtcgatgtaagcggtggcttggagacagaatcatctaatggaaaagatacactagaaggtgctggggatacatcagaggtgatggatactcaggcgggctccgtggatgaagagaatggccgacagttgggtgaggtagagctgcaatgtgggatttgtacaaaatggttcacggctgacacatttggcatagatacctcatcctgtctacctttcatgaccaactacagttttcattgcaacgtctgccatcacagtgggaatacctatttcctccggaagcaagcaaacttgaaggaaatgtgccttagtgctttggccaacctgacatggcagtcccgaacacaggatgaacatccgaagacaatgttctccaaagataaggatattataccatttattgataaatactgggagtgcatgacaaccagacacagacctgggaaaacgacttggccaaataacattgttaaaacaatgagtaaagaaagagatgtattcttggtaaaggaacacccagatccaggcagtaaagatccagaagaagattaccccaaatttggacttttggatcaggaccttagtaacattggtcctgcttatgacaaccaaaaacagagcagtgctgtgtctactagtgggaatttaaatgggggaattgcagcaggaagcagcggaaaaggacgaggagccaagcgcaaacagcaggatggagggaccacagggaccaccaagaaggcccggagtgaccctttgttttctgctcagcgccttccccctcatggctacccattggaacacccgtttaacaaagatggctatcggtatattctagctgagcctgatccgcaagcccctgaccccgagaagctggaaattgactgctgggcagggaaacctatttctggagacctttacagagcctgcttgtatgaacgggttttgttagccctacatgatcgagctccccagttaaagatctcagatgaccggctgactgtggttggagagaagggctactctatggtgagggcctctcatggagtacggaagggtgcctggtattttgaaatcactgtggatgagatgccaccagataccgctgccagactgggttggtcccagcccctaggaaaccttcaagctcctttaggttatgataaatttagctattcttggcggagcaaaaagggaaccaagttccaccagtccattggcaaacactactcttctggctatggacagggagacgtcctgggattttatattaatcttcctgaagacacagagacagccaagtcattgccagacacatacaaagataaggctttgataaaattcaagagttatttgtattttgaggaaaaagactttgtggataaagcagagaagagcctgaagcagactccccatagtgagataatattttataaaaatggtgtcaatcaaggtgtggcttacaaagatatttttgagggggtttacttcccagccatctcactgtacaagagctgcacggtttccattaactttggaccatgcttcaagtatcctccgaaggatctcacttaccgccctatgagtgacatgggctggggcgccgtggtagagcacaccctggctgacgtcttgtatcacgtggagacagaagtggatgggaggcgcagtcccccatgggaaccctgaccaggtccctcttttctgtcaaggactttctgggaataatactgggggttttgtttttgtttttgaactgtctcaaatgttctcccaaagatgctaaaaacacagcctctccttttagcaagttaaaaggctgggtaggactgcgggagactgcctgcctttcaccattttctccccacttccagtgactgctcttattttgtgtaccataagccaacaaccgctgactccaggattgcataagccccctgtgaaatcggtgctgtactgcataccctgccagctgtgacttgttatcctactatattttctaaggagtgaataatattgtccgagtaactaacttatttaaaagacatttccttctgtgggcattgactgtatcccacctgttttccaaggaaatggtaacctgtttctgagaacacctgaaatcaatggctatacattccaaaccaatctaaacgctaaaaaaaaaaaaaaaaaaaaa

SEQ ID NO: 26 - protein, 628 aa, Homo sapiens
  proline synthetase co-transcribed homolog (bacterial) (PROSC)
MAAAGAGPGQEAGAGPGPGAVANATGAEEGEMKPVAAGAAAPPGEGISAAPTVEPSSGEAEGGEANLVDVSGGLETESSNGKDTLEGAGDTSEVMDTQAGSVDEENGRQLGEVELQCGICTKWFTADTFGIDTSSCLPFMTNYSFHCNVCHHSGNTYFLRKQANLKEMCLSALANLTWQSRTQDEHPKTMFSKDKDIIPFIDKYWECMTTRHRPGKTTWPNNIVKTMSKERDVFLVKEHPDPGSKDPEEDYPKFGLLDQDLSNIGPAYDNQKQSSAVSTSGNLNGGIAAGSSGKGRGAKRKQQDGGTTGTTKKARSDPLFSAQRLPPHGYPLEHPFNKDGYRYILAEPDPQAPDPEKLEIDCWAGKPISGDLYRACLYERVLLALHDRAPQLKISDDRLTVVGEKGYSMVRASHGVRKGAWYFEITVDEMPPDTAARLGWSQPLGNLQAPLGYDKFSYSWRSKKGTKFHQSIGKHYSSGYGQGDVLGFYINLPEDTETAKSLPDTYKDKALIKFKSYLYFEEKDFVDKAEKSLKQTPHSEIIFYKNGVNQGVAYKDIFEGVYFPAISLYKSCTVSINFGPCFKYPPKDLTYRPMSDMGWGAVVEHTLADVLYHVETEVDGRRSPPWEP

SEQ ID NO: 27 - DNA, 935 bp, Artificial Sequence
  hypothetical protein (SPFH2 gene), clone IMAGE:100001855, parent clone DKFZp667H242.1E2 synthetic construct
gaagtgggtaagggtaatatggaggagcttccggcaggccccggcggctgaaagccggggcagaagtgctggtctcggtcgggattccgggcttggtcccaccgaggcggcgactgcggtaggagggaagaggttttggacgcgctggcctcccgccgctgtgcattgcagcattatttcagttcaaaatgaactatatgcctggcaccgccagcctcatcgaggacattgacaaaaagcacttggttctgcttcgagatggaaggacacttataggctttttaagaagcattgatcaatttgcaaacttagtgctacatcagactgtggagcgtattcatgtgggcaaaaaatacggtgatattcctcgagggatttttgtggtcagaggagaaaatgtggtcctactaggagaaatagacttggaaaaggagagtgacacacccctccagcaagtatccattgaagaaattctagaagaacaaagggtggaacagcagaccaagctggaagcagagaagttgaaagtgcaggccctgaaggaccgaggtctttccattcctcgagcagatactcttgatgagtactaatcttttgcccagaggctgttggctcttgaagagtaggggctgtcactgagtgaaagtgacatcctggccacctcacgcatttgatcacagactgtagagttttgaaaagtcacttttatttttaattattttacatatgcaacatgaagaaatcgtgtaggtgggttttttttttaataacaaaatcactgtttaaagaaacagtggcatagactccttcacacatcactgtggcaccagcaactacttctttatattgttcttcatatcccaaattagagtttacagggacagtcttcatttacttgtaaataaaatatgaatctcaaaaaaaaaaaaaaaaaa

SEQ ID NO: 28 - protein, 133 aa, Homo sapiens
  SPFH2
MNYMPGTASLIEDIDKKHLVLLRDGRTLIGFLRSIDQFANLVLHQTVERIHVGKKYGDIPRGIFVVRGENVVLLGEIDLEKESDTPLQQVSIEEILEEQRVEQQTKLEAEKLKVQALKDRGLSIPRADTLDEY

SEQ ID NO: 29 - DNA, 2182 bp, Homo sapiens
  subunit of RNA polymerase III transcription initiation factor, BRF1-like (BRF2)
aggtaagaggaaactccattggataaatggcgaggaaacgtatactccctcttaaggaacacggtgtcttccttcgtctccgggttcccgagaccccagagtcactgacctccgtccctcagctttcggggttcggcagcagaaggggcgggcccgggcctgggattggctggcgtcgtccgacccccttcgctgctctccattcgcaatcgcccgcgggcgcctgcgcgatgggtcggccgtggggagcggggcgggaagcgcttcagggcagcggatcccatgtcggccctgaggcgctcgggctacggccccagtgacggtccgtcctacggccgctactacgggcctgggggtggagatgtgccggtacacccacctccacccttatatcctcttcgccctgaacctccccagcctcccatttcctggcgggtgcgcgggggcggcccggcggagaccacctggctgggagaaggcggaggaggcgatggctactatccctcgggaggcgcctggccagagcctggtcgagccggaggaagccaccaggagcagccaccatatcctagctacaattctaactattggaattctactgcgagatctagggctccttacccaagtacatatcctgtaagaccagaattgcaaggccagagtttgaattcttatacaaatggagcgtatggtccaacataccccccaggccctggggcaaatactgcctcatactcaggggcttattatgcacctggttatactcagaccagttactccacagaagttccaagtacttaccgttcatctggcaacagcccaactccagtctctcgttggatctatccccagcaggactgtcagactgaagcaccccctcttagggggcaggttccaggatatccgccttcacagaaccctggaatgaccctgccccattatccttatggagatggtaatcgtagtgttccacaatcaggaccgactgtacgaccacaagaagatgcgtgggcttctcctggtgcttatggaatgggtggccgttatccctggccttcatcagcgccctcagcaccacccggcaatctctacatgactgaaagtacttcaccatggcctagcagtggctctccccagtcacccccttcacccccagtccagcagcccaaggattcttcatacccctatagccaatcagatcaaagcatgaaccggcacaactttccttgcagtgtccatcagtacgaatcctcggggacagtgaacaatgatgattcagatcttttggattcccaagtccagtatagtgctgagcctcagctgtatggtaatgccaccagtgaccatcccaacaatcaagatcaaagtagcagtcttcctgaagaatgtgtaccttcagatgaaagtactcctccgagtattaaaaaaatcatacatgtgctggagaaggtccagtatcttgaacaagaagtagaagaatttgtaggaaaaaagacagacaaagcatactggcttctggaagaaatgctaaccaaggaacttttggaactggattcagttgaaactgggggccaggactctgtacggcaggccagaaaagaggctgtttgtaagattcaggccatactggaaaaattagaaaaaaaaggattatgaaaggatttagaacaaagtggaagcctgttactaacttgaccaaagaacacttgatttggttaattaccctctttttgaaatgcctgttgatgacaagaagcaatacattccagctttcctttgattttatacttgaaaaactggcaaaggaatggaagaatattttagtcatgagttgttttcagttttcagacgaatgaatgtaataggaaactatggagttaccaatattgccaagtagactcactccttaaaaaatttatggatatctacaagctgcttcttaccagcaggagggaaacacacttcacacaacaggcttatcagaaacctaccagatgaaactggatataatctgagacaaacaggatgtgtttttttaaacatctggatatcttgtcacatttttgtacattgtgactgctttcaacatatacttcatgtgtaattatagcttagactttagccttcttggacttctgttttgttttgttatttgcagtttacaaatatagtattattctct

SEQ ID NO: 30 - protein, 457 aa, Homo sapiens
  subunit of RNA polymerase III transcription initiation factor, BRF1-like (BRF2)
MSALRRSGYGPSDGPSYGRYYGPGGGDVPVHPPPPLYPLRPEPPQPPISWRVRGGGPAETTWLGEGGGGDGYYPSGGAWPEPGRAGGSHQEQPPYPSYNSNYWNSTARSRAPYPSTYPVRPELQGQSLNSYTNGAYGPTYPPGPGANTASYSGAYYAPGYTQTSYSTEVPSTYRSSGNSPTPVSRWIYPQQDCQTEAPPLRGQVPGYPPSQNPGMTLPHYPYGDGNRSVPQSGPTVRPQEDAWASPGAYGMGGRYPWPSSAPSAPPGNLYMTESTSPWPSSGSPQSPPSPPVQQPKDSSYPYSQSDQSMNRHNFPCSVHQYESSGTVNNDDSDLLDSQVQYSAEPQLYGNATSDHPNNQDQSSSLPEECVPSDESTPPSIKKIIHVLEKVQYLEQEVEEFVGKKTDKAYWLLEEMLTKELLELDSVETGGQDSVRQARKEAVCKIQAILEKLEKKGL

SEQ ID NO: 31 - DNA, 3310 bp, Homo sapiens
  RAB11 family interacting protein 1 (class I) (RAB11FIP1), transcript variant 3
cacttgccgcccgtgccctgcggccctgcacgccccacccgcggtcgcgcgccgcgctccccgccgcctcaccttttcgcctggcatccgggcccgctactcgcccactgggagcgccgtggcgcctggtgttcggcgcgagcccggcggggctgcaggttccgccctgctccgccgcgccccgcccgggctggggtaaaggccgcggccgggccatgcagtgtcctcctcagggagggcaggagagcctgaggagtggcggggccgccagagagcgaaatgtcatcagtgcagtcacaacaggagcagttgtcccagtcagatccatctccgtcaccaaactcatgtagttcctttgagctaatagacatggatgctggcagcttgtatgaaccagtttctccccattggttttattgtaagataatagattctaaggagacatggattcctttcaactctgaggattcacagcagctggaagaggcatatagctctggaaaaggttgtaatgggagagttgttcctactgatgggggcagatatgatgttcatttgggggagaggatgcggtatgctgtatactgggatgaactggcatcggaagtgagacgatgtacgtggttttacaagggggacaaagacaataagtatgttccctactcggagagctccagccaagttttagaggaaacttacatgcttgctgtaactttggatgaatggaaaaagaaactggaatctcccaacagagaaattattattttacacaatccaaagcttatggtgcattaccagccagttgcagggtctgatggttggggttcaacacccacggagcagggtcgaccaagaactgtgaagagaggagttgagaacatctctgttgacattcattgtggagaacctttacaaatagatcacttggtttttgtagtccatgggattggaccagcttgtgatctccgctttcgaagcattgtacagtgtgttaatgattttcgcagtgtttccttgaacttgctacagacacattttaagaaagcccaagaaaatcagcagattgggagggtagaatttcttccagtcaactggcacagtcctttgcattctactggtgtggatgtagatctgcagcgaataaccctgcccagcattaaccgcctcaggcacttcaccaatgacacaattctggatgtcttcttctacaatagtcccacctactgtcagactattgtggacacagttgcttctgaaatgaaccgaatatacacactttttctacagaggaaccctgatttcaaagggggtgtatccattgctggtcatagtttaggttcgcttatattgtttgatatcctaacaaatcagaaagattctttgggggatattgacagtgaaaaggattcgctaaatattgtaatgtatcaaggagatacacctacactagaggaagatttgaagaaacttcagctctctgaattctttgatatctttgagaaggagaaagtagataaggaagctctggctttatgtacagaccgagatcttcaggaaataggaattcctttaggaccaagaaagaagatattaaactatttcagcaccagaaaaaactcaatgggtattaagagaccagccccgcagcctgcttcaggggcaaacatccccaaagaatctgagttctgcagtagcagtaatactagaaatggtgactatctggatgttggcattgggcaggtgtctgtgaaatacccccggctcatctataaaccagagatattctttgcctttggatctcccattggaatgttccttactgtccgaggactaaaaagaattgatcccaactacagatttccaacgtgcaaaggtttcttcaatatttatcacccttttgatcctgtggcctataggattgaaccaatggtggtcccaggagtggaatttgagccaatgctgatcccacatcataaaggcaggaagcggatgcacttagaactgagagagggcttgaccaggatgagtatggaccttaagaacaacttgctaggttcgctgcggatggcctggaagtcttttaccagagctccataccctgccttacaagcttcagaaacaccagaagaaactgaagcagaacctgaatcaacttcagagaagcctagtgatgttaacacagaagagacctctgtggcagttaaagaagaagtcctgcctatcaatgtggggatgctgaatggaggccaacgcattgactatgtgctacaggagaagcctattgaaagttttaatgagtatttatttgctttacaaagccatctatgctactgggagtctgaagatacagtattgctcgtcctcaaagagatctaccaaacccagggtatcttccttgatcagcctttacagtaaaaatgacccatctatggctgcttaatacggacattgagggatccttccccagaaaatccacctgtttgttgctgcaattttcctctcctcagctgcgtcatttcctgcatgttgcctgccacttactcaccactggggtctttggaagataatcttcctctttggaaatgaatggaaaagcaaaaggccctattacttttaaccactggcttcatataaacacttgccatttttttctgcatagctgggggtggtttgtgtctttaattctttgatgatagtttatagttgccacactttattgattagtacttgacagggtgtaaagcctattttgggtttgatttgttttgggtggggtagacatgtttttaaggaacttattgcttatctttagaaaatgttctagtttggaaacagattcttgagattcagaaggcattttggagtacacttatctcttgtttgtgttgaactgaaggctaagtctcagtggacatggaaaagacttttgggtgatttatttttgaacctgcatttctttcttatgtgtagtgtatgaagaaagactagaatgtagctttaaaaaagtgttgtttactctcttagaactgacagacttattgccagaaatcactgatgttcattgtttttgcaactgtttgagctgctgtaagagtctaaagttgacaagttagttcatgttaggtgcatctttataaagcaaagatgttgtatatcctaggcctcccttttatatttgatagaagttatttgctaatagcttctattcttacgttgaaaatagttgtaaaagctgatgaacctgaaattgtgtagcctctacaggctgctgaggttctaaataaaaccttttagtggtgcctttatggtg

SEQ ID NO: 32 - protein, 711 aa, Homo sapiens
  RAB11 family interacting protein 1 (class I) (RAB11FIP1), isoform 3
MSSVQSQQEQLSQSDPSPSPNSCSSFELIDMDAGSLYEPVSPHWFYCKIIDSKETWIPFNSEDSQQLEEAYSSGKGCNGRVVPTDGGRYDVHLGERMRYAVYWDELASEVRRCTWFYKGDKDNKYVPYSESSSQVLEETYMLAVTLDEWKKKLESPNREIIILHNPKLMVHYQPVAGSDGWGSTPTEQGRPRTVKRGVENISVDIHCGEPLQIDHLVFVVHGIGPACDLRFRSIVQCVNDFRSVSLNLLQTHFKKAQENQQIGRVEFLPVNWHSPLHSTGVDVDLQRITLPSINRLRHFTNDTILDVFFYNSPTYCQTIVDTVASEMNRIYTLFLQRNPDFKGGVSIAGHSLGSLILFDILTNQKDSLGDIDSEKDSLNIVMYQGDTPTLEEDLKKLQLSEFFDIFEKEKVDKEALALCTDRDLQEIGIPLGPRKKILNYFSTRKNSMGIKRPAPQPASGANIPKESEFCSSSNTRNGDYLDVGIGQVSVKYPRLIYKPEIFFAFGSPIGMFLTVRGLKRIDPNYRFPTCKGFFNIYHPFDPVAYRIEPMVVPGVEFEPMLIPHHKGRKRMHLELREGLTRMSMDLKNNLLGSLRMAWKSFTRAPYPALQASETPEETEAEPESTSEKPSDVNTEETSVAVKEEVLPINVGMLNGGQRIDYVLQEKPIESFNEYLFALQSHLCYWESEDTVLLVLKEIYQTQGIFLDQPLQ

SEQ ID NO: 33 - DNA, 5431 bp, Homo sapiens
  ash2 (absent, small, or homeotic)-like (Drosophila) (ASH2L), transcript variant 1
gggggctttgtgcgcggcggcggcgggagaggcggcggcggcggccagcacggaggcggaggccgagggggctgtgcacaggtcgccgcggagaggcgtgcgaattccgagccgagcgccgaggaccgtgctacccaggccgggctgccagccgcaggctcctctctggcagcagcggcggcgcggcgacccccgtccctcggcctccccttcccatcccacctcccgagccttcctcttcccgcagcacgcccggcccggcccggccgtggccctcctcagtgccggccgccatggcagaggcgtccggcgcggggaaaatctagcccggggatttcatgcggcctagctcggttccgcctcctcctcgcgcggccccagcggctgcccgcaccccagccccactccgggcctccgtgtctctcctgtgatcgcactgacacggccggggggttagaatggaacaaactgaaggcccgatgagagaaagggaaagttaaggatgctggagcagaacaatggatttctctttctctttcatgcaagggatcatgggaaacacaattcagcaaccacctcaactcattgactccgccaacatccgtcaggaggatgcctttgataacaacagtgacattgctgaagatggtggccagacaccatatgaagctactttgcagcaaggctttcagtacccagctacaacagaagatcttcctccactcacaaatgggtatccatcatcaatcagtgtgtatgaaactcaaaccaaataccagtcatataatcagtatcctaatgggtcagccaatggctttggtgcagttagaaactttagccccactgactattatcattcagaaattccaaacacaagaccacatgaaattctggaaaaaccttcccctccacagccaccacctcctccttcggtaccacaaactgtgattccaaagaagactggctcacctgaaattaaactaaaaataaccaaaactatccagaatggcagggaattgtttgagtcttccctttgtggagaccttttaaatgaagtacaggcaagtgagcacacgaaatcaaagcatgaaagcagaaaagaaaagaggaaaaaaagcaacaagcatgactcatcaagatctgaagagcgcaagtcacacaaaatccccaaattagaaccagaggaacaaaatagaccaaatgagagggttgacactgtatcagaaaaaccaagggaagaaccagtactaaaagaggaagccccagttcagccaatactatcttctgttccaacaacggaagtgtccactggtgttaagtttcaggttggcgatcttgtgtggtccaaggtgggaacctatccttggtggccttgtatggtttcaagtgatccccagcttgaggttcatactaaaattaacacaagaggtgcccgagaatatcatgtccagttttttagcaaccagccagagagggcgtgggttcatgaaaaacgggtacgagagtataaaggtcataaacagtatgaagaattactggctgaggcaaccaaacaagccagcaatcactctgagaaacaaaagattcggaaaccccgacctcagagagaacgtgctcagtgggatattggcattgcccatgcagagaaagcattgaaaatgactcgagaagaaagaatagaacagtatacttttatttacattgataaacagcctgaagaggctttatcccaagcaaaaaagagtgttgcctccaaaaccgaagttaaaaaaacccgacgaccaagatctgtgctgaatactcagccagaacagaccaatgcaggggaggtggcctcctcactctcaagtactgaaattcggagacatagccagaggcggcacacaagtgcggaagaggaagagccaccgcctgttaaaatagcctggaaaactgcggcagcaaggaaatccttaccagcttccattacgatgcacaaagggagcctggatttgcagaagtgtaacatgtctccagttgtgaaaattgaacaagtgtttgctcttcagaatgctacaggggatgggaaatttatcgatcaatttgtttattcaacaaagggaattggtaacaaaacagaaataagtgtcagggggcaagacaggcttataatttctacaccaaaccagagaaatgaaaagccaacgcagagtgtatcatctcctgaagcaacatctggttctacaggctcagtagaaaagaagcaacagagaagatcaattagaactcgttctgaatcagagaaatccactgaggttgtgccaaagaagaagatcaaaaaggagcaggttgaaacagttcctcaggctacagtgaagactggattacagaaaggtgccagcgagatttcagattcctgtaaacctctaaagaaaaggagtcgcgcctcaactgatgtagaaatgactagttcagcatacagagacacatctgactccgattctagaggactgagtgacctgcaggtaggctttggaaagcaagtagatagcccttcagctactgcagatgcagacgtttctgatgtgcagtccatggattcaagtttgtcgagaagaggcactggaatgagtaagaaggacactgtatgtcagatttgtgaaagctctggtgactctctgattccttgtgagggagagtgctgcaaacactttcacctggagtgcctgggattggcatcacttcctgatagcaagttcatctgcatggaatgtaaaactgggcagcacccatgtttttcgtgtaaagtgtctggtaaagatgtgaagcgttgttctgttggtgcttgtgggaaattttatcatgaagcctgtgtccgcaaattccccactgccatctttgaatcaaaaggattccgctgtcctcagcactgctgctctgcctgctctatggagaaagatatccacaaagcaagtaaaggccgcatgatgagatgtttaagatgtccagttgcctatcactctggagatgcttgcattgcggccggaagcatgttagtatcctcctacattctcatctgtagtaatcattccaaacggagcagtaattcttctgctgtaaatgtaggcttttgtttcgtttgtgccagagggctgatagttcaggaccattcagaccccatgttcagttcatatgcctataagtcccactacctactgaatgaatcaaatcgtgctgagttgatgaaattacctatgattccttcttcgtcagcttccaaaaagaaatgtgagaaaggtggaagattgctctgctgtgaatcgtgcccagcttccttccacccggaatgcctaagcatagaaatgccagaaggctgctggaattgtaatgactgtaaagctggcaagaaactacattacaagcagattgtttgggtcaaattgggaaattacagatggtggccagcagagatctgcaaccccaggtctgtgccactgaacatccagggccttaaacatgacttgggggacttccctgtattcttctttggttctcatgactactactgggtacaccagggcagagtgttcccttatgttgaaggagacaaaagctttgctgaagggcagactagtattaacaagaccttcaaaaaggcactggaagaagctgcaaaacgtttccaggaattgaaagcacaaagagaaagtaaagaagccctagagattgaaaaaaactcaagaaaaccccctccctacaaacacatcaaagctaacaaagtaataggaaaggtgcagatccaggttgctgacctgtcagagattccccgctgtaactgcaagccagctgatgaaaacccttgtggcttggaatcggagtgcctgaacagaatgttgcagtatgaatgccacccgcaggtgtgcccagctggagatcgttgtcagaaccagtgctttacaaagagactataccctgatgcagagatcatcaaaacggagcggagaggctggggcctcaggaccaaaaggagcattaagaagggtgaatttgtaaatgaatacgtcggtgaattaattgatgaagaagaatgcagattgcgaatcaagcgagcccacgagaacagtgtaactaatttttatatgttaactgttaccaaggaccgtataattgatgccggcccaaaaggaaattattctcgcttcatgaaccacagttgtaatcccaactgtgaaacacaaaagtggacagtgaatggagatgttcgagtgggactatttgctctctgtgatattcctgcagggatggagttaacatttaattataacctagattgtctgggcaacggcagaacggagtgccactgtggagcagataactgcagtggttttctaggagtgcggccaaagtcggcatgtgcgtcaacaaatgaagagaaggcaaaaaatgctaagttaaaacagaagagacgaaagatcaaaacagaaccaaagcagatgcatgaagattactgttttcaatgtggagatggtggagagctggtcatgtgtgacaaaaaagactgtcccaaagcataccacctcctatgccttaacctgactcagccaccatatggaaagtgggagtgtccgtggcatcagtgcgatgagtgcagcagtgcagctgtttccttctgtgaattctgtccacattcattttgtaaagatcatgaaaagggggccctggttccctctgcactggaaggccgcctctgctgctcggaacatgaccccatggctcctgtgtcaccagaatactggagcaagataaaatgtaaatgggaatcacaagatcatggagaagaagtaaaagaataaatgtgtggtgtcccctcctttctatttaagtgaaaaaagcaaatagatcatgcatttaaaaagaagagactgctacagtgcatacagcctttgccatcggaactgccttattaaagcaaaaatgggaaaccagttcatgcaggcagaagcagttggtggtgtctggtttttgtttgatttggttggtttgggattcttttgtggagggttaaattcccttggtcttttcttgccttttattgtgcttcagtgccattgcagcttgaaaaagaaatgtttttgctgttaaaataagaacaaagagaaaagtaagttttgttaatgagataaatttaaagtctaagatgtgttccttggttgtataaagcaaaagtagccatcattcctttatttattttcatttttaggaatttcaagaagtgtagttcaatagtctaatcaagtgtgtgtgtgttttaagtaggaatctgagaaagccctctaggaaagggtatgataagctttatatacctctttactgagcagtaggtaggctcacttctctttcccttcaaaatgcttttcataggcttagagaagggctctatggaagtattaaa

SEQ ID NO: 34 - protein, 1437 aa, Homo sapiens
  ash2 (absent, small, or homeotic)-like (Drosophila) (ASH2L), isoform a
MDFSFSFMQGIMGNTIQQPPQLIDSANIRQEDAFDNNSDIAEDGGQTPYEATLQQGFQYPATTEDLPPLTNGYPSSISVYETQTKYQSYNQYPNGSANGFGAVRNFSPTDYYHSEIPNTRPHEILEKPSPPQPPPPPSVPQTVIPKKTGSPEIKLKITKTIQNGRELFESSLCGDLLNEVQASEHTKSKHESRKEKRKKSNKHDSSRSEERKSHKIPKLEPEEQNRPNERVDTVSEKPREEPVLKEEAPVQPILSSVPTTEVSTGVKFQVGDLVWSKVGTYPWWPCMVSSDPQLEVHTKINTRGAREYHVQFFSNQPERAWVHEKRVREYKGHKQYEELLAEATKQASNHSEKQKIRKPRPQRERAQWDIGIAHAEKALKMTREERIEQYTFIYIDKQPEEALSQAKKSVASKTEVKKTRRPRSVLNTQPEQTNAGEVASSLSSTEIRRHSQRRHTSAEEEEPPPVKIAWKTAAARKSLPASITMHKGSLDLQKCNMSPVVKIEQVFALQNATGDGKFIDQFVYSTKGIGNKTEISVRGQDRLIISTPNQRNEKPTQSVSSPEATSGSTGSVEKKQQRRSIRTRSESEKSTEVVPKKKIKKEQVETVPQATVKTGLQKGASEISDSCKPLKKRSRASTDVEMTSSAYRDTSDSDSRGLSDLQVGFGKQVDSPSATADADVSDVQSMDSSLSRRGTGMSKKDTVCQICESSGDSLIPCEGECCKHFHLECLGLASLPDSKFICMECKTGQHPCFSCKVSGKDVKRCSVGACGKFYHEACVRKFPTAIFESKGFRCPQHCCSACSMEKDIHKASKGRMMRCLRCPVAYHSGDACIAAGSMLVSSYILICSNHSKRSSNSSAVNVGFCFVCARGLIVQDHSDPMFSSYAYKSHYLLNESNRAELMKLPMIPSSSASKKKCEKGGRLLCCESCPASFHPECLSIEMPEGCWNCNDCKAGKKLHYKQIVWVKLGNYRWWPAEICNPRSVPLNIQGLKHDLGDFPVFFFGSHDYYWVHQGRVFPYVEGDKSFAEGQTSINKTFKKALEEAAKRFQELKAQRESKEALEIEKNSRKPPPYKHIKANKVIGKVQIQVADLSEIPRCNCKPADENPCGLESECLNRMLQYECHPQVCPAGDRCQNQCFTKRLYPDAEIIKTERRGWGLRTKRSIKKGEFVNEYVGELIDEEECRLRIKRAHENSVTNFYMLTVTKDRIIDAGPKGNYSRFMNHSCNPNCETQKWTVNGDVRVGLFALCDIPAGMELTFNYNLDCLGNGRTECHCGADNCSGFLGVRPKSACASTNEEKAKNAKLKQKRRKIKTEPKQMHEDYCFQCGDGGELVMCDKKDCPKAYHLLCLNLTQPPYGKWECPWHQCDECSSAAVSFCEFCPHSFCKDHEKGALVPSALEGRLCCSEHDPMAPVSPEYWSKIKCKWESQDHGEEVKE

SEQ ID NO: 35 - DNA, 9706 bp, Homo sapiens
  U6-associated Sm-like (LSM) LSM1 homolog, U6 small nuclear RNA associated (S. cerevisiae) (LSM1)
gcctgctccaagggaaggatcaggagagaagaaacgcaaatcccagaaccgtgccaacatataaaaccccacattaagggttgtacagtgcactgggatttctcaagtcacccgcttggtcctcttccaagtatactttacttcctttcattcctctctaaaacttttttaaaaactttcactcctgctctaaaagttatcttggtttcttactctaccttatgccccttgggcgaattttttcctctgaggagggaagaatagagttgctgctgcagacacatcagattccctactggtaacagctggagtgcgtcacctctgacaaaattctggggacgctgggaacactgaatcaacatgggcaatgagaacagcacctcggacaaccagaggactttatcagctcagactccaaggtccgcgcagccacccgggaacagtcagaatataaaaaggaagcagcaggacacgcccggaagccctgaccacagagacgcgtccagcattggcagcgttgggcttggaggcttctgcaccgcttctgagagttctgccagcctggatccatgccttgtgtccccagaggtgactgagccaaggaaggacccacagggagccagggggccagaaggttctttgctgcccagcccaccaccgtcccaggagcgagagcacccctcgtcctccatgccctttgccgagtgtcccccggaaggttgcttggcaagtccagcagcggcacctgaagatggtcctcagactcagtctcccaggagggaacctgccccaaatgccccaggagacatcgcggcggcatttcccgctgagagggacagctctactccataccaagagattgctgccgtccccagtgctggaagagagagacagccgaaggaagaaggacagaagtcctccttctccttctccagtggcatcgaccagtcacctggaatgtcgccagtacccctcagagagccaatgaaggcaccgctgtgtggagagggggaccagcctggtggttttgagtcccaagagaaagaggctgcaggtggctttccccctgcagagtccaggcagggggtggcttctgtgcaagtgacccctgaggcccctgctgcagcccagcagggcacagaaagctcagcggtcttggagaagtcccccctaaaacccatggccccgatcccacaagatccagccccaagagcctcagacagagaaagaggccaaggggaggcgccgcctcagtatttaacagatgacttggaattcctcagggcctgccatctccctaggagcaattcaggggctgccccagaagcagaagtgaatgccgcttcccaggagagctgccagcagccagtgggagcatatctgccgcacgcagagctgccctggggcttgccaagtcctgccctggtgccagaggctgggggctctgggaaggaggctctggacaccattgatgttcagggtcacccacagacagggatgcgaggaaccaagcccaatcaagttgtctgtgtggcagcaggcggccagcccgaagggggtttgcctgtgagccctgaaccttccctgctcactccgactgaggaagcacatccagcttcaagcctcgcttcattcccagctgctcagattcctattgctgtagaagaacctggatcatcatccagggaatcagtttccaaggctgggatgccagtttctgcagatgcagccaaagaggtggtggatgcagggttggtgggactggagaggcaggtgtcagatcttggaagcaagggagagcatccagaaggggaccctggagaggttcctgccccatcaccccaggagaggggagagcacttgaacacggagcaaagccatgaggtccaaccaggagtaccaccccctcctcttcccaaggagcaaagccatgaggtccaaccaggagcaccaccccctcctcttcccaaggcaccaagtgaaagtgccagagggccaccggggccaacggatggagccaaggtccatgaagattccacaagcccagccgtggctaaagaaggaagcagatcacctggtgacagccctggaggaaaggaggaagccccagagccacctgatggtggagacccagggaacctgcaaggagaggactctcaggctttcagcagcaagcgtgatccagaagtaggcaaagatgagctttcaaagccaagcagtgatgcagagagcagagaccatcccagctcacactcagcacagccacccagaaaggggggtgctgggcacacggacgggccccactctcagacagcagaggctgatgcatctggcctaccacacaagctgggtgaggaggaccccgtcctgccccctgtgccagatggagctggtgagcccactgttcccgaaggagccatctgggaggggtcaggattgcagcccaaatgtcctgacacccttcagagcagggaaggattgggaagaatggagtctttcctgactttagaatcagagaaatcagattttccaccaactcctgttgcagaggttgcacccaaagcccaggaaggtgagagcacattggaaataaggaagatgggcagctgtgatggggagggcttgctgacgtccccagatcaaccccgcgggccggcgtgtgatgcgtcgagacaggaatttcatgctggggtgccacatcccccccagggggagaacttggcagcagacctggggctcacggcactcatcctggaccaagatcagcagggaatcccatcctgcccaggggaaggctggataagaggagctgcatccgagtggcccctactatcttctgagaagcatctccagccatcccaggcacaaccagagacatccatctttgacgtgctcaaggagcaggcccagccacctgaaaatgggaaagagacttctccaagccatccaggttttaaggaccagggagcagattcttcccaaatccatgtacctgtggaacctcaggaagataacaacttgcccactcatggaggacaggagcaggctttgggatcagaacttcaaagtcagctccccaaaggcaccctgtctgatactccaacttcatctcccactgacatggtttgggagagttctctgacagaagagtcagaattgtcagcaccaacgagacagaagttgcctgcactaggggagaagcggccagagggagcatgcggtgatggtcagtcctcgagggtctcgcctccagcagcagatgtcttaaaagacttttctcttgcagggaacttcagcagaaaggaaacttgctgcactgggcaggggccaaacaagtctcaacaggcattggctgatgccttggaagaaggcagccagcatgaagaagcatgtcaaaggcatccaggagcttctgaagcagctgatggttgttccccactctggggcttgagtaagagggagatggcaagtggaaacacaggggaggccccaccttgtcagcctgactcagtagctctcctggatgcagttccctgcctgccagccctggcgcccgccagccccggagtcacacccacccaggatgccccagagacagaggcatgtgatgaaacccaggaaggcaggcagcaaccagtgccggccccgcagcagaaaatggagtgccgggccacttcggatgcagagtccccaaagcttcttgcaagtttcccatcagctggggagcaaggtggtgaagccggggctgctgagactggtggcagcgctggtgcaggagacccaggaaagcagcaggctccggagaaacctggagaagctactttgagttgtggcctccttcagactgagcactgccttacctccggggaggaagcttctacctctgccctacgtgagtcctgccaagctgagcaccccatggccagctgccaggatgccttgctgccagccagagagctgggtgggattcccaggagcaccatggatttttctacacaccaggctgtcccagacccaaaggagctcctgctgtctgggccaccagaagtggctgctcctgacaccccttacctgcatgtcgacagtgctgcccagagaggagcagaagacagtggagtgaaagctgtttcctctgcagaccccagagctcctggcgaaagcccctgtcctgtaggggagcccccacttgccttggaaaatgctgcctccttgaagctgtttgctggctccctcgcccccctgttgcaaccaggagctgcaggtggggaaatccctgcagtgcaagccagcagtggtagtcccaaagccagaaccactgagggaccagtggactccatgccatgcctggaccggatgccacttctggccaagggcaagcaggcaacaggggaagagaaagcagcaacagctccaggtgcaggtgccaaggccagtggggagggcatggcaggtgatgcagcaggagagacagagggcagcatggagaggatgggagagccttcccaggacccaaagcagggcacatcaggtggtgtggacacaagctctgagcaaatcgccaccctcactggcttcccagacttcagggagcacatcgccaagatcttcgagaagcctgtgctcggagccctggccacacctggagaaaaggcaggagctgggaggagtgcagtgggtaaagacctcaccaggccattgggcccagagaagcttctagatgggcctccaggagtggatgtcacccttctccctgcacctcctgctcgactccaggtggagaagaagcaacagttggctggagaggctgagatttcccatctggctctgcaagatccagcttcagacaagcttctgggtccagcagggctgacctgggagcggaacttgccaggtgccggtgtggggaaggagatggcaggtgtcccacccacactgagggaagacgagaggccagaggggcctggggcagcctggccaggcctggaaggccaggcttactcacagctggagaggagcaggcaggaattagcttcaggtcttccttcaccagcagctactcaggagctccctgtggagagagctgctgccttccaggtggctccccatagccatggagaagaggccgtggcccaagacagaattccttctggaaagcagcaccaggaaacatctgcctgcgacagtccacatggagaagatggtcccggggactttgctcacacaggggttccaggacatgtgccaaggtccacgtgtgccccttctcctcagagggaggttttgactgtgcctgaggccaacagtgagccctggacccttgacacgcttgggggtgaaaggagacccggagtcactgctggcatcttggaaatgcgaaatgccctgggcaaccagagcacccctgcaccaccaactggagaagtggcagacactcccctggagcctggcaaggtggcaggcgctgctggggaagcagagggtgacatcaccctgagcacagctgagacacaggcatgtgcgtccggtgatctgcctgaagcaggtactacgaggacattctccgttgtggcaggtgacttggtgctgccaggaagctgtcaggacccagcctgctctgacaaggctccggggatggagggtacagctgcccttcatggggacagcccagccaggccccagcaggctaaggagcagccagggcctgagcgccccattccagctggggatgggaaggtgtgcgtctcctcacctccagagcctgacgaaactcacgacccgaagctgcaacatttggctccagaagagctccacactgacagagagagccccaggcctggcccatccatgttaccttcggttcctaagaaggatgctccaagagtcatggataaagtcacttcagatgagaccagaggtgcggaaggaacagaaagttcacctgtggcagatgatatcatccagcccgctgcccccgcagacctggaaagcccaaccttagctgcctcttcctaccacggtgatgttgttggccaggtctctacggatctgatagcccagagcatctccccagctgctgcccatgcgggtcttcctccctcggctgcagaacacatagtttcgccatctgccccagctggtgacagagtagaagcttccactccctcctgcccagatccggccaaggacctcagcaggagttccgattctgaagaggcatttgagaccccggagtcaacgacccctgtcaaagctccgccagctccacccccaccaccccccgaagtcatcccagaacccgaggtcagcacacagccacccccggaagaaccaggatgtggttctgagacagtccctgtccctgatggcccacggagcgactcggtggaaggaagtcccttccgtcccccgtcacactccttctctgccgtcttcgatgaagacaagccgatagccagcagtgggacttacaacttggactttgacaacattgagcttgtggatacctttcagaccttggagcctcgtgcctcagacgctaagaatcaggagggcaaagtgaacacacggaggaagtccacggattccgtccccatctctaagtctacactgtcccggtcgctcagcctgcaagccagtgactttgatggtgcttcttcctcaggcaatcccgaggccgtggcccttgccccagatgcatatagcacgggttccagcagtgcttctagtacccttaagcgaactaaaaaaccgaggccgccttccttaaaaaagaaacagaccaccaagaaacccacagagacccccccagtgaaggagacgcaacaggagccagatgaagagagccttgtccccagtggggagaatctagcatctgagacgaaaacggaatctgccaagacggaaggtcctagcccagccttattggaggagacgccccttgagcccgctgtggggcccaaagctgcctgccctctggactcagagagtgcagaaggggttgtccccccggcttctggaggtggcagagtgcagaactcaccccctgtcgggaggaaaacgctgcctcttaccacggccccggaggcaggggaggtaaccccatcggatagcggggggcaagaggactctccagccaaagggctctccgtaaggctggagtttgactattctgaggacaagagtagttgggacaaccagcaggaaaacccccctcctaccaaaaagataggcaaaaagccagttgccaaaatgcccctgaggaggccaaagatgaaaaagacacccgagaaacttgacaacactcctgcctcacctcccagatcccctgctgaacccaatgacatccccattgctaaaggtacttacacctttgatattgacaagtgggatgaccccaattttaaccctttttcttccacctcaaaaatgcaggagtctcccaaactgccccaacaatcatacaactttgacccagacacctgtgatgagtccgttgacccctttaagacatcctctaagacccccagctcaccttctaaatccccagcctcctttgagatcccagccagtgctatggaagccaatggagtggacggggatgggctaaacaagcccgccaagaagaagaagacgcccctaaagactgacacatttagggtgaaaaagtcgccaaaacggtctcctctctctgatccaccttcccaggaccccaccccagctgctacaccagaaacaccaccagtgatctctgcggtggtccacgccacagatgaggaaaagctggcggtcaccaaccagaagtggacgtgcatgacagtggacctagaggctgacaaacaggactacccgcagccctcggacctgtccacctttgtaaacgagaccaaattcagttcacccactgaggagttggattacagaaactcctatgaaattgaatatatggagaaaattggctcctccttacctcaggacgacgatgccccgaagaagcaggccttgtaccttatgtttgacacttctcaggagagccctgtcaagtcatctcccgtccgcatgtcagagtccccgacgccgtgttcagggtcaagttttgaagagactgaagcccttgtgaacactgctgcgaaaaaccagcatcctgtcccacgaggactggcccctaaccaagagtcacacttgcaggtgccagagaaatcctcccagaaggagctggaggccatgggcttgggcaccccttcagaagcgattgaaattacagctcccgagggctcctttgcctctgctgacgccctcctcagcaggctagctcaccccgtctctctctgtggtgcacttgactatctggagcccgacttagcagaaaagaaccccccactattcgctcagaaactccaggaggagttagagtttgccatcatgcggatagaagccctgaagctggccaggcagattgctttggcttcccgcagccaccaggatgccaagagagaggctgctcacccaacagacgtctccatctccaaaacagccttgtactcccgcatcgggaccgctgaggtggagaaacctgcaggccttctgttccagcagcccgacctggactctgccctccagatcgccagagcagagatcataaccaaggagagagaggtctcagaatggaaagataaatatgaagaaagcaggcgggaagtgatggaaatgaggaaaatagtggccgagtatgagaagaccatcgctcagatgatagaggacgaacagagagagaagtcagtctcccaccagacggtgcagcagctggttctggagaaggagcaagccctggccgacctgaactccgtggagaagtctctggccgacctcttcagaagatatgagaagatgaaggaggtcctagaaggcttccgcaagaatgaagaggtgttgaagagatgtgcgcaggagtacctgtcccgggtgaagaaggaggagcagaggtaccaggccctgaaggtgcacgcggaggagaaactggacagggccaatgctgagattgctcaggttcgaggcaaggcccagcaggagcaagccgcccaccaggccagcctgcggaaggagcagctgcgagtggacgccctggaaaggacgctggagcagaagaataaagaaatagaagaactcaccaagatttgtgacgaactgattgccaaaatggggaaaagctaactctgaaccgaatgttttggacttaactgttgcgtgcaatatgaccgtcggcacactgctgttcctccagttccatggacaggttctgttttcactttttcgtatgcactactgtatttcctttctaaataaaattgatttgattgtatgcagtactaaggagactatcagaatttcttgctattggtttgcattttcctagtataattcatagcaagttgacctcagagttcctgtatcagggagattgtctgattctctaataaaagacacattgctgaccttggccttgccctttgtacacaagttcccagggtgagcagcttttggatttaatatgaacatgtacagcgtgcatagggactcttgccttaaggagtgtaaacttgatctgcatttgctgatttgtttttaaaaaaacaagaaatgcatgtttcaaataaaattctctattgtaaataaaattttttctttggatcttggcaaaaaaaaaaaaaaa

SEQ ID NO: 36 - protein, 2948 aa, Homo sapiens
  U6-associated Sm-like (LSM) LSM1 homolog, U6 small nuclear RNA associated (S. cerevisiae) (LSM1)
MGNENSTSDNQRTLSAQTPRSAQPPGNSQNIKRKQQDTPGSPDHRDASSIGSVGLGGFCTASESSASLDPCLVSPEVTEPRKDPQGARGPEGSLLPSPPPSQEREHPSSSMPFAECPPEGCLASPAAAPEDGPQTQSPRREPAPNAPGDIAAAFPAERDSSTPYQEIAAVPSAGRERQPKEEGQKSSFSFSSGIDQSPGMSPVPLREPMKAPLCGEGDQPGGFESQEKEAAGGFPPAESRQGVASVQVTPEAPAAAQQGTESSAVLEKSPLKPMAPIPQDPAPRASDRERGQGEAPPQYLTDDLEFLRACHLPRSNSGAAPEAEVNAASQESCQQPVGAYLPHAELPWGLPSPALVPEAGGSGKEALDTIDVQGHPQTGMRGTKPNQVVCVAAGGQPEGGLPVSPEPSLLTPTEEAHPASSLASFPAAQIPIAVEEPGSSSRESVSKAGMPVSADAAKEVVDAGLVGLERQVSDLGSKGEHPEGDPGEVPAPSPQERGEHLNTEQSHEVQPGVPPPPLPKEQSHEVQPGAPPPPLPKAPSESARGPPGPTDGAKVHEDSTSPAVAKEGSRSPGDSPGGKEEAPEPPDGGDPGNLQGEDSQAFSSKRDPEVGKDELSKPSSDAESRDHPSSHSAQPPRKGGAGHTDGPHSQTAEADASGLPHKLGEEDPVLPPVPDGAGEPTVPEGAIWEGSGLQPKCPDTLQSREGLGRMESFLTLESEKSDFPPTPVAEVAPKAQEGESTLEIRKMGSCDGEGLLTSPDQPRGPACDASRQEFHAGVPHPPQGENLAADLGLTALILDQDQQGIPSCPGEGWIRGAASEWPLLSSEKHLQPSQAQPETSIFDVLKEQAQPPENGKETSPSHPGFKDQGADSSQIHVPVEPQEDNNLPTHGGQEQALGSELQSQLPKGTLSDTPTSSPTDMVWESSLTEESELSAPTRQKLPALGEKRPEGACGDGQSSRVSPPAADVLKDFSLAGNFSRKETCCTGQGPNKSQQALADALEEGSQHEEACQRHPGASEAADGCSPLWGLSKREMASGNTGEAPPCQPDSVALLDAVPCLPALAPASPGVTPTQDAPETEACDETQEGRQQPVPAPQQKMECRATSDAESPKLLASFPSAGEQGGEAGAAETGGSAGAGDPGKQQAPEKPGEATLSCGLLQTEHCLTSGEEASTSALRESCQAEHPMASCQDALLPARELGGIPRSTMDFSTHQAVPDPKELLLSGPPEVAAPDTPYLHVDSAAQRGAEDSGVKAVSSADPRAPGESPCPVGEPPLALENAASLKLFAGSLAPLLQPGAAGGEIPAVQASSGSPKARTTEGPVDSMPCLDRMPLLAKGKQATGEEKAATAPGAGAKASGEGMAGDAAGETEGSMERMGEPSQDPKQGTSGGVDTSSEQIATLTGFPDFREHIAKIFEKPVLGALATPGEKAGAGRSAVGKDLTRPLGPEKLLDGPPGVDVTLLPAPPARLQVEKKQQLAGEAEISHLALQDPASDKLLGPAGLTWERNLPGAGVGKEMAGVPPTLREDERPEGPGAAWPGLEGQAYSQLERSRQELASGLPSPAATQELPVERAAAFQVAPHSHGEEAVAQDRIPSGKQHQETSACDSPHGEDGPGDFAHTGVPGHVPRSTCAPSPQREVLTVPEANSEPWTLDTLGGERRPGVTAGILEMRNALGNQSTPAPPTGEVADTPLEPGKVAGAAGEAEGDITLSTAETQACASGDLPEAGTTRTFSVVAGDLVLPGSCQDPACSDKAPGMEGTAALHGDSPARPQQAKEQPGPERPIPAGDGKVCVSSPPEPDETHDPKLQHLAPEELHTDRESPRPGPSMLPSVPKKDAPRVMDKVTSDETRGAEGTESSPVADDIIQPAAPADLESPTLAASSYHGDVVGQVSTDLIAQSISPAAAHAGLPPSAAEHIVSPSAPAGDRVEASTPSCPDPAKDLSRSSDSEEAFETPESTTPVKAPPAPPPPPPEVIPEPEVSTQPPPEEPGCGSETVPVPDGPRSDSVEGSPFRPPSHSFSAVFDEDKPIASSGTYNLDFDNIELVDTFQTLEPRASDAKNQEGKVNTRRKSTDSVPISKSTLSRSLSLQASDFDGASSSGNPEAVALAPDAYSTGSSSASSTLKRTKKPRPPSLKKKQTTKKPTETPPVKETQQEPDEESLVPSGENLASETKTESAKTEGPSPALLEETPLEPAVGPKAACPLDSESAEGVVPPASGGGRVQNSPPVGRKTLPLTTAPEAGEVTPSDSGGQEDSPAKGLSVRLEFDYSEDKSSWDNQQENPPPTKKIGKKPVAKMPLRRPKMKKTPEKLDNTPASPPRSPAEPNDIPIAKGTYTFDIDKWDDPNFNPFSSTSKMQESPKLPQQSYNFDPDTCDESVDPFKTSSKTPSSPSKSPASFEIPASAMEANGVDGDGLNKPAKKKKTPLKTDTFRVKKSPKRSPLSDPPSQDPTPAATPETPPVISAVVHATDEEKLAVTNQKWTCMTVDLEADKQDYPQPSDLSTFVNETKFSSPTEELDYRNSYEIEYMEKIGSSLPQDDDAPKKQALYLMFDTSQESPVKSSPVRMSESPTPCSGSSFEETEALVNTAAKNQHPVPRGLAPNQESHLQVPEKSSQKELEAMGLGTPSEAIEITAPEGSFASADALLSRLAHPVSLCGALDYLEPDLAEKNPPLFAQKLQEELEFAIMRIEALKLARQIALASRSHQDAKREAAHPTDVSISKTALYSRIGTAEVEKPAGLLFQQPDLDSALQIARAEIITKEREVSEWKDKYEESRREVMEMRKIVAEYEKTIAQMIEDEQREKSVSHQTVQQLVLEKEQALADLNSVEKSLADLFRRYEKMKEVLEGFRKNEEVLKRCAQEYLSRVKKEEQRYQALKVHAEEKLDRANAEIAQVRGKAQQEQAAHQASLRKEQLRVDALERTLEQKNKEIEELTKICDELIAKMGKS

SEQ ID NO: 37 - DNA, 4005 bp, Homo sapiens
  BCL2-associated athanogene 4 (BAG4)
cggcagggttggaaaatgatggaagaggcggaggtggaggcgaccgagtgctgagaggaacctgcggaatcggccgagatggggtctggcgcgcgctttccctcggggacccttcgtgtccggtggttgctgttgcttggcctggtgggcccagtcctcggtgcggcgcggccaggctttcaacagacctcacatctttcttcttatgaaattataactccttggagattaactagagaaagaagagaagcccctaggccctattcaaaacaagtatcttatgttattcaggctgaaggaaaagagcatattattcacttggaaaggaacaaagaccttttgcctgaagattttgtggtttatacttacaacaaggaagggactttaatcactgaccatcccaatatacagaatcattgtcattatcggggctatgtggagggagttcataattcatccattgctcttagcgactgttttggactcagaggattgctgcatttagagaatgcgagttatgggattgaacccctgcagaacagctctcattttgagcacatcatttatcgaatggatgatgtctacaaagagcctctgaaatgtggagtttccaacaaggatatagagaaagaaactgcaaaggatgaagaggaagagcctcccagcatgactcagctacttcgaagaagaagagctgtcttgccacagacccggtatgtggagctgttcattgtcgtagacaaggaaaggtatgacatgatgggaagaaatcagactgctgtgagagaagagatgattctcctggcaaactacttggatagtatgtatattatgttaaatattcgaattgtgctagttggactggagatttggaccaatggaaacctgatcaacatagttgggggtgctggtgatgtgctggggaacttcgtgcagtggcgggaaaagtttcttatcacacgtcggagacatgacagtgcacagctagttctaaagaaaggttttggtggaactgcaggaatggcatttgtgggaacagtgtgttcaaggagccacgcaggcgggattaatgtgtttggacaaatcactgtggagacatttgcttccattgttgctcatgaattgggtcataatcttggaatgaatcacgatgatgggagagattgttcctgtggagcaaagagctgcatcatgaattcaggagcatcgggttccagaaactttagcagttgcagtgcagaggactttgagaagttaactttaaataaaggaggaaactgccttcttaatattccaaagcctgatgaagcctatagtgctccctcctgtggtaataagttggtggacgctggggaagagtgtgactgtggtactccaaaggaatgtgaattggacccttgctgcgaaggaagtacctgtaagcttaaatcatttgctgagtgtgcatatggtgactgttgtaaagactgtcggttccttccaggaggtactttatgccgaggaaaaaccagtgagtgtgatgttccagagtactgcaatggttcttctcagttctgtcagccagatgtttttattcagaatggatatccttgccagaataacaaagcctattgctacaacggcatgtgccagtattatgatgctcaatgtcaagtcatctttggctcaaaagccaaggctgcccccaaagattgtttcattgaagtgaattctaaaggtgacagatttggcaattgtggtttctctggcaatgaatacaagaagtgtgccactgggaatgctttgtgtggaaagcttcagtgtgagaatgtacaagagatacctgtatttggaattgtgcctgctattattcaaacgcctagtcgaggcaccaaatgttggggtgtggatttccagctaggatcagatgttccagatcctgggatggttaacgaaggcacaaaatgtggtgctggaaagatctgtagaaacttccagtgtgtagatgcttctgttctgaattatgactgtgatgttcagaaaaagtgtcatggacatgggaaatgaatactgcattgagggacggacttctggtcttcttcttcctaattgttccccttattgtctgtgctatttttatcttcatcaagagggatcaactgtggagaagctacttcagaaagaagagatcacaaacatatgagtcagatggcaaaaatcaagcaaacccttctagacagccggggagtgttcctcgacatgtttctccagtgacacctcccagagaagttcctatatatgcaaacagatttgcagtaccaacctatgcagccaagcaacctcagcagttcccatcaaggccacctccaccacaaccgaaagtatcatctcagggaaacttaattcctgcccgtcctgctcctgcacctcctttatatagttccctcacttgatttttttaaccttctttttgcaaatgtcttcagggaactgagctaatactttttttttttcttgatgttttcttgaaaagcctttctgttgcaactatgaatgaaaacaaaacaccacaaaacagacttcactaacacagaaaaacagaaactgagtgtgagagttgtgaaatacaaggaaatgcagtaaagccagggaatttacaataacatttccgtttccatcattgaataagtcttattcagtcatcggtgaggttaatgcactaatcatggattttttgaacatgttattgcagtgattctcaaattaactgtattggtgtaagatttttgtcattaagtgtttaagtgttattctgaattttctaccttagttatcattaatgtagttcctcattgaacatgtgataatctaatacctgtgaaaactgactaatcagctgccaataatatctaatatttttcatcatgcacgaattaataatcatcatactctagaatcttgtctgtcactcactacatgaataagcaaatattgtcttcaaaagaatgcacaagaaccacaattaagatgtcatattattttgaaagtacaaaatatactaaaagagtgtgtgtgtattcacgcagttactcgcttccatttttatgacctttcaactataggtaataactcttagagaaattaatttaatattagaatttctattatgaatcatgtgaaagcatgacattcgttcacaatagcactattttaaataaattataagctttaaggtacgaagtatttaatagatctaatcaaatatgttgattcatggctataataaagcaggagcaattataaaatcttcaatcaattgaacttttacaaaaccacttgagaatttcatgagcactttaaaatctgaactttcaaagcttgctattaaatcatttagaatgtttacatttactaaggtgtgctgggtcatgtaaaatattagacactaatattttcatagaaattaggctggagaaagaaggaagaaatggttttcttaaatacctacaaaaaagttactgtggtatctatgagttatcatcttagctgtgttaaaaatgaatttttactatggcagatatggtatggatcgtaaaattttaagcactaaaaattttttcataacctttcataataaagtttaataataggtttattaactgaatttcattagttttttaaaagtgtttttggtttgtgtatatatacatatacaaatacaacatttacaataaataaaatacttgaaattctcttttgtgtctcctagtagcttcctactcaactatttataatctcattaattaaaaagttataattttagataaaaattctagtcaaatttttacagatattatctcactaattttcagacttttgccaaagtgtgcacaatggctttttgttaataaagaacagattagttttgaagaaggcaaaaatttcagttttctgaagacagcatgttattttaacaatcaagtatacatattaaaaattgtgagcaatctcaaaaaaaaaaaaaaa

SEQ ID NO: 38 - protein, 655 aa, Homo sapiens; identical to SEQ ID NO: 4
  BCL2-associated athanogene 4 (BAG4)

SEQ ID NO: 39 - DNA, 4111 bp, Homo sapiens
  DDHD domain containing 2 (DDHD2)
cggcagggttggaaaatgatggaagaggcggaggtggaggcgaccgagtgctgagaggaacctgcggaatcggccgagatggggtctggcgcgcgctttccctcggggacccttcgtgtccggtggttgctgttgcttggcctggtgggcccagtcctcggtgcggcgcggccaggctttcaacagacctcacatctttcttcttatgaaattataactccttggagattaactagagaaagaagagaagcccctaggccctattcaaaacaagtatcttatgttattcaggctgaaggaaaagagcatattattcacttggaaaggaacaaagaccttttgcctgaagattttgtggtttatacttacaacaaggaagggactttaatcactgaccatcccaatatacagaatcattgtcattatcggggctatgtggagggagttcataattcatccattgctcttagcgactgttttggactcagaggattgctgcatttagagaatgcgagttatgggattgaacccctgcagaacagctctcattttgagcacatcatttatcgaatggatgatgtctacaaagagcctctgaaatgtggagtttccaacaaggatatagagaaagaaactgcaaaggatgaagaggaagagcctcccagcatgactcagctacttcgaagaagaagagctgtcttgccacagacccggtatgtggagctgttcattgtcgtagacaaggaaaggtatgacatgatgggaagaaatcagactgctgtgagagaagagatgattctcctggcaaactacttggatagtatgtatattatgttaaatattcgaattgtgctagttggactggagatttggaccaatggaaacctgatcaacatagttgggggtgctggtgatgtgctggggaacttcgtgcagtggcgggaaaagtttcttatcacacgtcggagacatgacagtgcacagctagttctaaagaaaggttttggtggaactgcaggaatggcatttgtgggaacagtgtgttcaaggagccacgcaggcgggattaatgtgtttggacaaatcactgtggagacatttgcttccattgttgctcatgaattgggtcataatcttggaatgaatcacgatgatgggagagattgttcctgtggagcaaagagctgcatcatgaattcaggagcatcgggttccagaaactttagcagttgcagtgcagaggactttgagaagttaactttaaataaaggaggaaactgccttcttaatattccaaagcctgatgaagcctatagtgctccctcctgtggtaataagttggtggacgctggggaagagtgtgactgtggtactccaaaggaatgtgaattggacccttgctgcgaaggaagtacctgtaagcttaaatcatttgctgagtgtgcatatggtgactgttgtaaagactgtcggttccttccaggaggtactttatgccgaggaaaaaccagtgagtgtgatgttccagagtactgcaatggttcttctcagttctgtcagccagatgtttttattcagaatggatatccttgccagaataacaaagcctattgctacaacggcatgtgccagtattatgatgctcaatgtcaagtcatctttggctcaaaagccaaggctgcccccaaagattgtttcattgaagtgaattctaaaggtgacagatttggcaattgtggtttctctggcaatgaatacaagaagtgtgccactgggaatgctttgtgtggaaagcttcagtgtgagaatgtacaagagatacctgtatttggaattgtgcctgctattattcaaacgcctagtcgaggcaccaaatgttggggtgtggatttccagctaggatcagatgttccagatcctgggatggttaacgaaggcacaaaatgtggtgctggaaagatctgtagaaacttccagtgtgtagatgcttctgttctgaattatgactgtgatgttcagaaaaagtgtcatggacatggggtatgtaatagcaataagaattgtcactgtgaaaatggctgggctcccccaaattgtgagactaaaggatacggaggaagtgtggacagtggacctacatacaatgaaatgaatactgcattgagggacggacttctggtcttcttcttcctaattgttccccttattgtctgtgctatttttatcttcatcaagagggatcaactgtggagaagctacttcagaaagaagagatcacaaacatatgagtcagatggcaaaaatcaagcaaacccttctagacagccggggagtgttcctcgacatgtttctccagtgacacctcccagagaagttcctatatatgcaaacagatttgcagtaccaacctatgcagccaagcaacctcagcagttcccatcaaggccacctccaccacaaccgaaagtatcatctcagggaaacttaattcctgcccgtcctgctcctgcacctcctttatatagttccctcacttgatttttttaaccttctttttgcaaatgtcttcagggaactgagctaatactttttttttttcttgatgttttcttgaaaagcctttctgttgcaactatgaatgaaaacaaaacaccacaaaacagacttcactaacacagaaaaacagaaactgagtgtgagagttgtgaaatacaaggaaatgcagtaaagccagggaatttacaataacatttccgtttccatcattgaataagtcttattcagtcatcggtgaggttaatgcactaatcatggattttttgaacatgttattgcagtgattctcaaattaactgtattggtgtaagatttttgtcattaagtgtttaagtgttattctgaattttctaccttagttatcattaatgtagttcctcattgaacatgtgataatctaatacctgtgaaaactgactaatcagctgccaataatatctaatatttttcatcatgcacgaattaataatcatcatactctagaatcttgtctgtcactcactacatgaataagcaaatattgtcttcaaaagaatgcacaagaaccacaattaagatgtcatattattttgaaagtacaaaatatactaaaagagtgtgtgtgtattcacgcagttactcgcttccatttttatgacctttcaactataggtaataactcttagagaaattaatttaatattagaatttctattatgaatcatgtgaaagcatgacattcgttcacaatagcactattttaaataaattataagctttaaggtacgaagtatttaatagatctaatcaaatatgttgattcatggctataataaagcaggagcaattataaaatcttcaatcaattgaacttttacaaaaccacttgagaatttcatgagcactttaaaatctgaactttcaaagcttgctattaaatcatttagaatgtttacatttactaaggtgtgctgggtcatgtaaaatattagacactaatattttcatagaaattaggctggagaaagaaggaagaaatggttttcttaaatacctacaaaaaagttactgtggtatctatgagttatcatcttagctgtgttaaaaatgaatttttactatggcagatatggtatggatcgtaaaattttaagcactaaaaattttttcataacctttcataataaagtttaataataggtttattaactgaatttcattagttttttaaaagtgtttttggtttgtgtatatatacatatacaaatacaacatttacaataaataaaatacttgaaattctcttttgtgtctcctagtagcttcctactcaactatttataatctcattaattaaaaagttataattttagataaaaattctagtcaaatttttacagatattatctcactaattttcagacttttgccaaagtgtgcacaatggctttttgttaataaagaacagattagttttgaagaaggcaaaaatttcagttttctgaagacagcatgttattttaacaatcaagtatacatattaaaaattgtgagcaatctcaaaaaaaaaaaaaaa

SEQ ID NO: 40 - protein, 819 aa, Homo sapiens
  DDHD domain containing 2 (DDHD2)
MGSGARFPSGTLRVRWLLLLGLVGPVLGAARPGFQQTSHLSSYEIITPWRLTRERREAPRPYSKQVSYVIQAEGKEHIIHLERNKDLLPEDFVVYTYNKEGTLITDHPNIQNHCHYRGYVEGVHNSSIALSDCFGLRGLLHLENASYGIEPLQNSSHFEHIIYRMDDVYKEPLKCGVSNKDIEKETAKDEEEEPPSMTQLLRRRRAVLPQTRYVELFIVVDKERYDMMGRNQTAVREEMILLANYLDSMYIMLNIRIVLVGLEIWTNGNLINIVGGAGDVLGNFVQWREKFLITRRRHDSAQLVLKKGFGGTAGMAFVGTVCSRSHAGGINVFGQITVETFASIVAHELGHNLGMNHDDGRDCSCGAKSCIMNSGASGSRNFSSCSAEDFEKLTLNKGGNCLLNIPKPDEAYSAPSCGNKLVDAGEECDCGTPKECELDPCCEGSTCKLKSFAECAYGDCCKDCRFLPGGTLCRGKTSECDVPEYCNGSSQFCQPDVFIQNGYPCQNNKAYCYNGMCQYYDAQCQVIFGSKAKAAPKDCFIEVNSKGDRFGNCGFSGNEYKKCATGNALCGKLQCENVQEIPVFGIVPAIIQTPSRGTKCWGVDFQLGSDVPDPGMVNEGTKCGAGKICRNFQCVDASVLNYDCDVQKKCHGHGVCNSNKNCHCENGWAPPNCETKGYGGSVDSGPTYNEMNTALRDGLLVFFFLIVPLIVCAIFIFIKRDQLWRSYFRKKRSQTYESDGKNQANPSRQPGSVPRHVSPVTPPREVPIYANRFAVPTYAAKQPQQFPSRPPPPQPKVSSQGNLIPARPAPAPPLYSSLT

SEQ ID NO: 41 - DNA, 1919 bp, Homo sapiens
  Wolf-Hirschhorn syndrome candidate 1-like 1 (WHSC1L1), transcript variant long
aggacgtaagtgacggcgaaggcggtgcgacagcagctggagggcagaggaggcggcgcggggtgtcctgtcctcgccatgaggccgcagcaggcgccggtgtccggaaaggtgttcattcagcgagactacagcagtggcacacgctgccagttccagaccaagttccctgcggagctggagaaccggattgataggcagcagtttgaagaaacagttcgaactctaaataacctttatgcagaagcagagaagctcggcggccagtcatatctcgaaggttgtttggcttgtttaacagcatataccatcttcctatgcatggaaactcattatgagaaggttctgaagaaagtctccaaatacattcaagagcagaatgagaagatctatgctccacaaggcctcctcctgacagaccctattgagcgaggactgcgagttattgaaattaccatttatgaagacagaggcatgagcagtggaagataaaccgaagaattaaagatcccacttccagccgggcccctcatgtatccactggccgaccgcagagtgtccctacctcctctccagagcatcattcctttctatctgctgccagagccacggtgccatttactccaaggactcactttctaaaattccacacctggagtgacctctagtcgctcagcatccactttgtgtctccaaattgtgtaggactctgtaatcttttgattagtttctgagaaaacacaatgaagcacttcacttttttttattcaaagccatttaataaaacacagttggtcagcccagtgcaaagcttgttatctgccaccagtacataccattggttctcttcattccttgggccagcttctcaggtggctttagacctcaacaagccgtatcttcaccagtgttctatcttgttcccctaaattaataaaatgtttttctccaggattttggtgagggttggctgtggctgtcgttttgcacctcccagatttcaaagaattactggttttaccatgactcaaatcttaagatctgtttctactattcagttcctcaaactgaagcttattgaaaaaaaaatgtataatgttatttgttttattatagcaattatgcctaattaaagcagtatttaatgcaatttccagttatttctttggagaattttatgtcattgttccattaccttgaatgttggaaagatatgatacgtgctgcttgttcatcacaaaaatcagtaagcacaataaagtggatgccaaaccatcagacacataaatgttcccgctgtgtccctggatatggaataagcaggtataaaaaatattttaattatagttttgttataaatataacttatgagaaaaaaatttgataggaataatactgtatattactaatttttaactatccctaaggcaaaccttatgacccacagaattttctcatatacagtattcagtgcacagaaatcttatgattggctcaagtacagtaagttacttctcagtaaaactctcaagtctgagtccatatttgtagctctgcttttggctgtacgttcctaggatcggggctgcttatgcctttcgtttatccttggggtttgagagcgctgtatttgggagagagtttaaaaatacattaggagagagaaaccattaaaagtttcactgtcagatatattgtaggtgctaatactggatttcgtctcagatttaatttcttttatgggtctgttagtcattcaacaaatcccataagtatgtgttaatattttaattgtgtaaaactcatttgttactttacagcctgtaatagtgtgtctgcattttcaacctgttgcaataactttgctgaaatattaacacattaataaaacttttcttaaacaaaaaaaaaaaaaaaaa

SEQ ID NO: 42 - protein, 137 aa, Homo sapiens
  Wolf-Hirschhorn syndrome candidate 1-like 1 (WHSC1L1), isoform long
MRPQQAPVSGKVFIQRDYSSGTRCQFQTKFPAELENRIDRQQFEETVRTLNNLYAEAEKLGGQSYLEGCLACLTAYTIFLCMETHYEKVLKKVSKYIQEQNEKIYAPQGLLLTDPIERGLRVIEITIYEDRGMSSGR

SEQ ID NO: 43 - DNA, 1183 bp, Homo sapiens
  transforming, acidic coiled-coil containing protein 2 (TACC2), transcript variant 1
gagagtagcgcgggagctgagaagttgcagggttgagttggtcccggcaagtccttgagcagtttgttcctctgtcttcccgcttcctggtgccccgactgcgtccccacgaacgccccgtccttaccgccggctgctgtggagtgcctcgctgtctcccaggtccccgagttcctggtttcagagaagatgaccgaagaagtggatttcctgggacaggactctgatgggggtagtgaggaagtggtcctaactcctgcagagctcattgaaagattggagcaggcctggatgaatgaaaagtttgcccctgagctgctggagagcaagcctgagattgtagaatgtgtcatggaacagctggagcacatggaagaaaatctcaggagagccaaaagggaggacctgaaggtcagcatccaccaaatggagatggagaggatccgctacgtcctcagcagctacttgcggtgtcgcctcatgaagatagagaagtttttccctcatgtccttgagaaggaaaaaacacgtcctgagggggagccttccagcctctcgccggaagagttggcctttgccagagagttcatggcgaacacagagtcctatctgaaaaatgtcgccttgaagcacatgccccctaacttacagaaggtggacctctttcgggcagttcccaaaccagatctagattcttacgtgtttctgagagtgagagaacgacaagaaaacatactggtagaaccagacacagatgagcagagggactacgtgattgacctggagaagggctcacagcacttgatccgatacaaaaccattgcacctctggttgcatctggagctgtccagctaatttaaaactaggcataaacagccaggcatggtgactcaggcctgtaatcccagcactttgggaggccgaggcgggcggatcatgaggtcaggagttcgagaccaaccgaccaacatggtgaaaccccatctttactgaaaatacaaaataattagccgggtgttggtggtgtgcacctgtaatcccggctactcggggggccggggcaggagaatcgcttgaacctgggagcaggaggttgcagtgagccgaggtcgtgccattgcactccagcctgggtgacagtgagactttgtcacaaaaaaaaaaaaaaaaaaaaaaaaaaaa

SEQ ID NO: 44 - protein, 223 aa, Homo sapiens
  transforming, acidic coiled-coil containing protein 2 (TACC2), isoform a
MTEEVDFLGQDSDGGSEEVVLTPAELIERLEQAWMNEKFAPELLESKPEIVECVMEQLEHMEENLRRAKREDLKVSIHQMEMERIRYVLSSYLRCRLMKIEKFFPHVLEKEKTRPEGEPSSLSPEELAFAREFMANTESYLKNVALKHMPPNLQKVDLFRAVPKPDLDSYVFLRVRERQENILVEPDTDEQRDYVIDLEKGSQHLIRYKTIAPLVASGAVQLI

SEQ ID NO: 45 - DNA, 7861 bp, Homo sapiens
  golgi autoantigen, golgin subfamily a, 7 (GOLGA7), HSPC041 protein (LOC51125), Golgi complex-associated protein of 16kDa (GCP16)
gtttggggcatctccgcggtccggcccggggccccgggatctcggctgtccttcctcccggcataagatgcacatttttctgctctggagccgggaatgaaatattcttgagttcttacaactttatgacgagacccatgtgtggtgctattgagaaattcattgggaagttggaagacatttcaaacaacaggttgttttggtttctatagtacaattggggtggcattctgttttgtgaaaggaggaaggacttaggccagaaaactcatatgctatggttaactggttcccagcctccgagaatcttgttttccatggtgtaaaacttactcagcatcaggataagggataacgactctatggatatacagaatccttcaccatggtaaaactcgcaaacccgctttatactgagtggattttggaggccatcaaaaaagtgaaaaagcagaaacagcgtccttcagaagaaaggatatgcaatgctgtgtcttcatcccatggcttggatcgtaaaactgttttagaacaattggagttgagtgttaaagatggaacaattttaaaagtctcaaataaaggactcaattcctataaagatcctgataatcctgggcgaatagcacttcctaagcctcggaaccatggaaaattggataataaacaaaatgtggattggaataaactgataaagcgggcagttgagggcttggcagagtctggtggctcaactttgaaaagcattgaacgttttttgaaaggtcagaaggatgtgtctgcattattcggaggcagtgctgcctctggctttcaccagcagttacgattggctatcaaacgtgccattggccacggcagactccttaaagatggacctctttatcggctcaacactaaagcaaccaacgtggatgggaaagagagttgtgagtctctttcctgtttacctccagtgtcccttcttccacatgaaaaggataagccggttgctgaaccaatccccatctgtagtttctgtcttggtacaaaagaacaaaaccgagaaaagaagccagaggaactcatctcctgtgccgactgtggcaacagtggccatccatcctgtttaaagttttcccctgaactaacggttcgagtgaaggccttacggtggcagtgcatcgagtgtaaaacatgcagctcctgtcgagatcaaggcaaaaatgcggataacatgctcttttgtgattcatgtgaccgaggttttcacatggagtgttgtgatccgccactcacccgtatgccaaaaggcatgtggatatgtcaaatatgtcgacctaggaaaaaaggacgaaaacttctacaaaagaaggcagcacagataaaacggcgctatactaatccaataggacgtccaaaaaacaggttaaagaaacaaaacacggtatcaaaaggtcccttcagcaaagttcgaactggccctggaaggggtaggaaacgaaaaatcactctttccagccaatcagcatcatcatcatcagaagaaggatatttagagcggatagatggcttggacttctgcagagatagcaatgtctccttgaggttcaacaagaaaaccaaagggctcattgatggccttaccaaattttttaccccttcccctgatgggcggaaagctcggggggaagtggtggactactctgagcaatatcgaatcagaaagaggggcaacaggaaatcaagcacttcagattggcccacagacaatcaggatggctgggatggcaaacaagaaaatgaggagcgactttttgggagccaggaaatcatgactgagaaagatatggaattatttcgtgatatccaagaacaagcactgcagaaagttggagtgactggtccccctgatccacaagtccgctgtccctctgtcattgagtttgggaagtatgaaattcacacctggtactcctccccatatcctcaagaatactcaaggctgcccaaattgtatctttgtgaattttgtctaaaatatatgaaaagtagaactattctgcagcagcacatgaagaaatgtggttggttccatcctcctgccaatgagatttacagaaagaataatatttctgtctttgaggttgatgggaatgtgagtaccatttattgtcaaaacctgtgtcttttggcaaagttgtttcttgaccacaaaaccctctattacgatgtggagccatttcttttttatgtactaacacagaatgatgtcaagggctgccaccttgttggctacttttctaaggaaaagcactgccaacagaagtacaatgtttcctgtataatgattcttcctcaataccagcgtaagggctatggcaggtttctcatcgatttcagttatttgttatcaaagcgtgaaggccaagcagggtctccagagaaaccgttatctgatctgggtcgtctttcctacatggcatattggaaaagtgtaatattggagtgcctttatcaccaaaatgacaagcagatcagcattaagaagttaagcaagttgactggaatctgccctcaagacatcacttccacactccaccacctacgaatgctggacttccgtagtgaccaatttgtgattatccgccgggaaaaacttatccaggatcacatggcaaagcttcagctgaatttgcgacctgtagatgtagatccagaatgtttgcgctggactccagtcatagtgtccaactctgtggtctcagaggaggaagaagaggaggctgaggaaggagaaaacgaagagccacagtgccaggaaagagaattagagatcagtgtgggaaagtctgtgtctcatgagaacaaagaacaagattcttattcagtagaaagtgaaaagaaaccagaagttatggctccagtcagttctacacgtttgagcaaacaagtccttcctcatgatagtcttcctgcaaatagccagccatctcggaggggccgctgggggaggaagaacagaaaaacccaggaacgttttggtgataaagattctaaactgctcttggaagagacgtcttcagctcctcaggaacaatatggagaatgtggggagaaatcagaagccacccaggaacaatacactgaaagtgaagaacagctggtggcttctgaggagcagccaagccaggacgggaaacctgaccttcccaagagaagactcagtgagggggttgagccctggcgaggacagctcaagaaaagccctgaggctctgaagtgcagattaacagaaggaagtgagaggctgccccgtcgctacagtgagggtgacagggctgtcctcaggggcttcagtgagagcagcgaggaggaggaggagccggaaagccctcggtcaagctcgccaccaattctcacaaagcccacgctgaagcgaaagaaaccatttctccaccgaaggaggagagtccgaaagcgcaaacaccacaatagcagtgtagtcacagaaactatttctgagaccactgaagtgttagatgaaccttttgaagattctgactccgagaggccaatgccaagattagaacccacatttgagatcgatgaagaagaggaggaagaggatgaaaatgaacttttccctagagaatacttccgtcgtttgtcttcgcaggatgtactcaggtgtcagtcctcttctaagaggaagtctaaagatgaagaagaagatgaagagtcagatgatgctgatgacactcctatcttaaagccagtatctcttttgcgaaaacgtgatgtgaagaattctcctcttgagccagatacatccacacctttgaaaaagaaaaagggatggcccaaaggcaagagccgcaaaccaatccactggaagaaaagacctggtcgaaaaccaggatttaagttgagtcgggaaatcatgccagtttctactcaagcatgcgtcattgagcccatcgtttccattcctaaagctggacgtaaacccaagatccaggagagtgaagaaactgttgagccaaaagaagacatgcccctacccgaggagaggaaggaggaggaggagatgcaagcagaggcagaagaggctgaagagggtgaggaagaggatgcagccagcagtgaagtcccagcagcctctccagcagacagcagcaatagtcctgagaccgaaaccaaggagcctgaggtggaggaggaagaagagaagccccgtgtctcagaggagcagaggcagtcagaggaggagcagcaggaattagaggagccagagccagaggaggaggaagatgcagctgcagagactgcccagaatgacgaccacgacgctgatgatgaggatgatggccacctggagtccacaaagaaaaaggagctagaggaacagcccacgagggaagatgtcaaggaggagcctggtgttcaagagtcttttttagatgctaatatgcagaagagtagggaaaagataaaggataaagaggaaaccgagctggattccgaagaggagcagccttcccatgacacgtccgtggtgtcagagcagatggctgggtctgaggacgaccacgaagaagactcccacactaaggaagagttaatcgaattaaaagaggaggaagagattcctcatagtgagctggatctggaaactgtacaggcagtgcagtctttgactcaagaagaaagcagtgagcatgagggcgcctaccaggactgtgaggaaactcttgcggcgtgtcagaccctgcagagttacacccaggctgacgaggaccctcagatgtccatggttgaagactgtcatgcgtcagaacataatagccctatctcctccgttcagtctcaccccagccagtcagtccgttcggtcagcagtcccaacgtgcctgcccttgagagtggctacacccagatcagcccagaacaaggatccctgtccgcaccctctatgcagaacatggagaccagccccatgatggatgtgccttccgtatcagaccactctcagcaggtggtggacagcggcttcagtgacctgggcagcattgagagcaccactgaaaactatgagaacccaagcagttacgactccacgatgggcggcagcatctgtgggaacagctcttcccagagcagctgctcctacggtgggctgtcgtcctccagcagcctcacccagagcagctgtgtggtcactcagcagatggccagcatgggcagcagctgcagcatgatgcagcagagcagcgtccagcctgctgccaactgcagcatcaagtcacctcagagctgcgtggtggagaggcctcccagtaaccagcagcagcagccgccaccaccgcctccacagcagccacagccgccgccgccacaaccacaaccagcaccacagcctccaccaccccagcagcagccgcaacagcagccgcagcctcagccccagcagcctccacccccaccccctccccagcagcagcccccgctgtcacagtgtagtatgaataacagtttcaccccagctcctatgatcatggagataccagaatctggaagcactgggaacataagtatctatgagaggattccaggggattttggtgccggcagctactctcaaccatcagccaccttcagcctagccaagctgcagcagctgaccaacaccattatggaccctcatgccatgccttatagccattctcctgctgtgacttcctatgcaaccagtgtttctctgtccaatacaggactggctcagctggctccatctcatcccttagctgggactcctcaagcacaagccaccatgacgccacccccaaacttggcatccactaccatgaacctcacatctcctctgcttcagtgcaacatgtctgccaccaacattggcattcctcacacgcagagattgcaagggcaaatgccagtgaaggggcacatttccatccgctccaagtctgcgccactgccctctgcggctgctcaccagcagcagctgtatggccgtagcccatcggcagttgccatgcaggctggccctcgcgcactggctgttcagcgtggcatgaacatgggggttaatctgatgcctactcccgcctataatgtcaattccatgaatatgaacaccttgaatgccatgaacagctatcgaatgacacagcccatgatgaacagcagttaccatagtaaccctgcctacatgaaccagacagcacagtatcctatgcagatgcagatgggaatgatggggagccaggcctatacccagcagcctatgcagcctaaccctcatgggaacatgatgtacacaggcccctcccatcacagctacatgaacgctgctggcgtgcccaagcagtcactcaacggaccttacatgagaagatgagcaagatgaacttgcaatcaaaaacttaaatatatataaataaaggaaccttttatactgacaaaccagagaaaaatggacctttttccagttaaaatattgctgtagatttagaggaatttttctttggtttattttattttttagaaaacctgatcttctcttttttttgggttcattttgttgtgggttttggttttcttcacaatcttgaacattttacagtagaactcatctaaaaatggatttggggatggggaaacatgcacaaaatcttttcataattaaaaagagccttactttctttacataccacatggacagaatttgtgtaaaagtgaattatctttattttaaaatgtatgtttcccctcactgtttgcagctcccaatgttgtcatttttaaatgttatatacatctcaagggttaaccagaccctttcctccaaacccaacctttcatttcctacttcattccagcaggaggcacttaggggagactcggatggggacatggagaacaacccaagctccttaaacttattattattgttaatattattattattattattaataaagtgaggcaggaaaatgcttctccttttaaaatcccctccactcctcacacacacacacctcttgaaacccttccccaagaatgtttctttatagacggacttcattgaaatctttgttgttcttgaatcaagtgtaatataatttttttcttcttttttaaaatattcccactcagcactcagagacacaaaaatactgtaagtctcaattaacagcagaatctcagagaaaagctgtttgcaatccaaatccagcctttggaggaatagagatggtcaattaacaatcaaaaagaggagattaacctcttgtttttttaccacctggtgaatcagccataacgcacacacacgccacccagcctcttgtttctagtatgtactttgaaatgctaactgagggtcttgatgcttgagcctttgactgataaaactcaaatagcagtccccagtgatttgcctcttaggttctttcttaaattgttggtggatgactgtacattttagtgatttgaaaaataactgacaaaccattgaaacagtttattttatgttggaagagatggcgcagatgtgtgtcagaagggagatcacggtgtgagtttcgtagctatttaagtgatacatacctctagtttttgtatgtcttttgagatcctgagttcatcccctgtgaatcagagtgcacaagcacctctcctgtgagtggctaatgagaagagggacagaccgaccaccagcacagtagggcagatctggacagcagaatgttataacgcaagttcatgtgttgctcccaactccattctcttttctctcgtgcaaccagtttgcccattctcttcctattacttgctccagggataggtaaaaaaaaaa

SEQ ID NO: 46 - protein, 2004 aa, Homo sapiens
  golgi autoantigen, golgin subfamily a, 7 (GOLGA7), HSPC041 protein (LOC51125), Golgi complex-associated protein of 16kDa (GCP16)
MVKLANPLYTEWILEAIKKVKKQKQRPSEERICNAVSSSHGLDRKTVLEQLELSVKDGTILKVSNKGLNSYKDPDNPGRIALPKPRNHGKLDNKQNVDWNKLIKRAVEGLAESGGSTLKSIERFLKGQKDVSALFGGSAASGFHQQLRLAIKRAIGHGRLLKDGPLYRLNTKATNVDGKESCESLSCLPPVSLLPHEKDKPVAEPIPICSFCLGTKEQNREKKPEELISCADCGNSGHPSCLKFSPELTVRVKALRWQCIECKTCSSCRDQGKNADNMLFCDSCDRGFHMECCDPPLTRMPKGMWICQICRPRKKGRKLLQKKAAQIKRRYTNPIGRPKNRLKKQNTVSKGPFSKVRTGPGRGRKRKITLSSQSASSSSEEGYLERIDGLDFCRDSNVSLRFNKKTKGLIDGLTKFFTPSPDGRKARGEVVDYSEQYRIRKRGNRKSSTSDWPTDNQDGWDGKQENEERLFGSQEIMTEKDMELFRDIQEQALQKVGVTGPPDPQVRCPSVIEFGKYEIHTWYSSPYPQEYSRLPKLYLCEFCLKYMKSRTILQQHMKKCGWFHPPANEIYRKNNISVFEVDGNVSTIYCQNLCLLAKLFLDHKTLYYDVEPFLFYVLTQNDVKGCHLVGYFSKEKHCQQKYNVSCIMILPQYQRKGYGRFLIDFSYLLSKREGQAGSPEKPLSDLGRLSYMAYWKSVILECLYHQNDKQISIKKLSKLTGICPQDITSTLHHLRMLDFRSDQFVIIRREKLIQDHMAKLQLNLRPVDVDPECLRWTPVIVSNSVVSEEEEEEAEEGENEEPQCQERELEISVGKSVSHENKEQDSYSVESEKKPEVMAPVSSTRLSKQVLPHDSLPANSQPSRRGRWGRKNRKTQERFGDKDSKLLLEETSSAPQEQYGECGEKSEATQEQYTESEEQLVASEEQPSQDGKPDLPKRRLSEGVEPWRGQLKKSPEALKCRLTEGSERLPRRYSEGDRAVLRGFSESSEEEEEPESPRSSSPPILTKPTLKRKKPFLHRRRRVRKRKHHNSSVVTETISETTEVLDEPFEDSDSERPMPRLEPTFEIDEEEEEEDENELFPREYFRRLSSQDVLRCQSSSKRKSKDEEEDEESDDADDTPILKPVSLLRKRDVKNSPLEPDTSTPLKKKKGWPKGKSRKPIHWKKRPGRKPGFKLSREIMPVSTQACVIEPIVSIPKAGRKPKIQESEETVEPKEDMPLPEERKEEEEMQAEAEEAEEGEEEDAASSEVPAASPADSSNSPETETKEPEVEEEEEKPRVSEEQRQSEEEQQELEEPEPEEEEDAAAETAQNDDHDADDEDDGHLESTKKKELEEQPTREDVKEEPGVQESFLDANMQKSREKIKDKEETELDSEEEQPSHDTSVVSEQMAGSEDDHEEDSHTKEELIELKEEEEIPHSELDLETVQAVQSLTQEESSEHEGAYQDCEETLAACQTLQSYTQADEDPQMSMVEDCHASEHNSPISSVQSHPSQSVRSVSSPNVPALESGYTQISPEQGSLSAPSMQNMETSPMMDVPSVSDHSQQVVDSGFSDLGSIESTTENYENPSSYDSTMGGSICGNSSSQSSCSYGGLSSSSSLTQSSCVVTQQMASMGSSCSMMQQSSVQPAANCSIKSPQSCVVERPPSNQQQQPPPPPPQQPQPPPPQPQPAPQPPPPQQQPQQQPQPQPQQPPPPPPPQQQPPLSQCSMNNSFTPAPMIMEIPESGSTGNISIYERIPGDFGAGSYSQPSATFSLAKLQQLTNTIMDPHAMPYSHSPAVTSYATSVSLSNTGLAQLAPSHPLAGTPQAQATMTPPPNLASTTMNLTSPLLQCNMSATNIGIPHTQRLQGQMPVKGHISIRSKSAPLPSAAAHQQQLYGRSPSAVAMQAGPRALAVQRGMNMGVNLMPTPAYNVNSMNMNTLNAMNSYRMTQPMMNSSYHSNPAYMNQTAQYPMQMQMGMMGSQAYTQQPMQPNPHGNMMYTGPSHHSYMNAAGVPKQSLNGPYMRR

SEQ ID NO: 47 - DNA, 3472 bp, Homo sapiens
  GINS complex subunit 4 (SLD5 homolog, GINS4), similar to RIKEN cDNA 4933405K01, clone MGC:14799 IMAGE:4068454
gctgagagcagcaaggccagagttgaaaacttacagagtcctgaggctttcagactgaaaaaggctttcttctgtcactgacaatcgccaccatgatccatagtcttttcttgatcaactcctctggagacattttcctggagaaacattggaaaagtgtggtcagccgttctgtttgtgattacttttttgaggcgcaagagagagctactgaggcagaaaatgtgcctccggttatccctacccctcaccactatctcttaagtgtttaccgccacaagatcttttttgtggccgtgatccagacggaggtcccccctctgtttgtcattgagtttcttcaccgagtggtggacacatttcaggattattttggagtctgttcagagccagtgatcaaagacaatgtagttgtggtttatgaggtattggaagagatgcttgacaatggttttccattggctaccgagtcgaacattcttaaagaactcataaagcctcctaccatccttcgaacggttgtcaacaccatcacaggaagcacgaatgtgggtgaccagcttcccactgggcagctgtcagtggtgccttggcgacggactggggtgaaatataccaacaatgaggcctattttgatgtgattgaagagattgatgcaattattgataaatcaggctccacaattactgctgagatccagggggtgattgatgcctgtgtcaagctgactggcatgccagaccttacactttccttcatgaaccctaggttgttggatgatgtcagcttccatccttgtgttcgtttcaaacgctgggaatctgagcgcatcctctccttcatccctcctgatggaaacttccgcctgctgtcttaccatgtcagtgcacagaatctggttgcaatcccagtgtatgtcaaacataacatcagtttccgggacagtagttcccttggacgctttgaaataacggtgggacccaagcagacgatggggaagaccattgagggagtgactgtcaccagccagatgcccaagggggtcctgaacatgagccttactccatcacaggggacacacacattcgacccagtcacaaagatgctgtcttgggatgtaggaaaaataaatccacaaaagctaccaagtttgaaggggaccatgagtcttcaggctggagcttccaaaccagatgaaaaccccacaattaacctgcagtttaagatccagcagctggccatttctggactcaaggtgaatcgtctggatatgtatggagaaaagtacaaaccctttaagggcataaaatacatgaccaaagctgggaagttccaagttcgaacctgaagggagcatttgctgagggaatagtcttgcacattttttcatttcttacttgtctaaaagtaaaaaaaaatatcagcctgtctcctaggtcagtcccctcctggacccacccgctcccttttttccttagccttcagtgccatggaactaatcaagggaggaaaaggtcaccagggagaactggacagaactgaaacacagcaacaccagttctcaaggacaaggtgtgtgatgggggtaggaagcttggtgcttatgtaaccattttaaacgtggtttctataggaaagaccaacatttgtttagcttgcttggctttaattatctaaagccaatgaaagacttctttgttgattttttaagatagaaagattaaaaagaaagaaagatgggaagaaaatgaatgtcagtcaaggaaaggccacttaaggatctgctctatgaaggagaagaaagaggaaaaagaagtaaaggagttaggaggagacacttaaatgaaagattggcaagaaaagcagtcggactctaccttaaggagggatgggaaggaaagagttgtgttggtttctttctgattcctctactcatgtagaaaacacttgtacttctggaaatggactggagactttttaaatttgagtccactattgacatggaaaccccagtggaatcagattttccctcaaagaccatgatggtatcggactagttttcagacactgcctgttgctgtccatcagcacttggtctcttatcttcagtgagaaggtgacccgccttcttcccatggtggctgcctaaagtgcttcttttctaacccaaaacagttctactcacttccttttacagaattcaccggccattttcctgttacctgatccttctacaggatttttaaaaagtaagagagtttcagagaagccgatcccataatccccagtgcagccagggcccgtgtgtcatcgtactggagtagagggccgactcttcccatgaaggtgagcacagctgtgagtgagtgagctcatatctccatttgtcagtgctggactggtaccagatcgtaaccttcccgttggtcggaaacttttccatctgtcgccctagaaaaagagaaagcttaccatcgagggtgtggttgatccttgaagctgcttggtaaagttatcatttcctcagtcttttcttttgtactcctatcatgtattcattaatatctaccagtcccttttcattctaagacaaaacatttctcctaaatctctgaataaaatcagtgctgtaggaagatggactgtgttgatcatgggtgtaagcaacccagtttaagaaacatggcaactaaagggatacctcaggctttctttcccagtgggtcatttttgtcctagttcagtgtgtctgttactatttaaatatttatacaaaagggtttttgtttatagcttaaggaatgatactgtgctctgcttggtgcatggagaaaaaggaagacccgtactctccacaccctagagcttttctctaaatattgtgcaaagtttttgctagttttatcttctgactttgggactagtttttgctgcagagttgtgttgctttgtgattttcctctgggatagtgtactgtacacaaccagatgtgttccacactccgtgactccgcagtttgtcctggagtgacatacacatccaccatggaaagggaagcatctctgcctgtggattctcaagtacttggaagcacctctcctgaggaacctacaggattctaaggtttcctaggtcactgaacaactaatcttggtccctgaatatttctaggtttgtaagtgcagcagttttatttcctctagaactcatcctgtttcaagggaagtacctaagaagatatagagtgtttctagggtaagggacctgcaggtgtaagcatagatgaaataactgtcctgtcacatgtgcagcaggccatggagtgtagcgggcatcgctgccgccattcctgcagcatcaccataagcagtgcagggtgtctccatcgagctgtttggttccatgtgtgtttaacatgtgcagaagtagcttctctgtttaagtttaataaagttgagtttcaaccagtc

SEQ ID NO: 48 - protein, 418 aa, Homo sapiens
  GINS complex subunit 4 (SLD5 homolog, GINS4), similar to RIKEN cDNA 4933405K01, clone MGC:14799 IMAGE:4068454
MIHSLFLINSSGDIFLEKHWKSVVSRSVCDYFFEAQERATEAENVPPVIPTPHHYLLSVYRHKIFFVAVIQTEVPPLFVIEFLHRVVDTFQDYFGVCSEPVIKDNVVVVYEVLEEMLDNGFPLATESNILKELIKPPTILRTVVNTITGSTNVGDQLPTGQLSVVPWRRTGVKYTNNEAYFDVIEEIDAIIDKSGSTITAEIQGVIDACVKLTGMPDLTLSFMNPRLLDDVSFHPCVRFKRWESERILSFIPPDGNFRLLSYHVSAQNLVAIPVYVKHNISFRDSSSLGRFEITVGPKQTMGKTIEGVTVTSQMPKGVLNMSLTPSQGTHTFDPVTKMLSWDVGKINPQKLPSLKGTMSLQAGASKPDENPTINLQFKIQQLAISGLKVNRLDMYGEKYKPFKGIKYMTKAGKFQVRT

SEQ ID NO: 49 - DNA, 1259 bp, Homo sapiens
  MYST histone acetyltransferase (monocytic leukemia) 3 (MYST3), monocytic leukemia zinc finger protein (MOZ), zinc finger protein 220 (ZNF220), runt-related transcription factor binding protein 2 (RUNXBP2)
ccggagctgggttgctcctgctcccgtctccaagtcctggtacctccttcaagctgggagagggctctagtccctggttctgaacactctggggttctcgggtgcaggccgccatgagcaaacggaaggcgccgcaggagactctcaacgggggaatcaccgacatgctcacagaactcgcaaactttgagaagaacgtgagccaagctatccacaagtacaatgcttacagaaaagcagcatctgttatagcaaaatacccacacaaaataaagagtggagctgaagctaagaaattgcctggagtaggaacaaaaattgctgaaaagattgatgagtttttagcaactggaaaattacgtaaactggaaaagattcggcaggatgatacgagttcatccatcaatttcctgactcgagttagtggcattggtccatctgctgcaaggaagtttgtagatgaaggaattaaaacactagaagatctcagaaaaaatgaagataaattgaaccatcatcagcgaattgggctgaaatattttggggactttgaaaaaagaattcctcgtgaagagatgttacaaatgcaagatattgtactaaatgaagttaaaaaagtggattctgaatacattgctacagtctgtggcagtttcagaagaggtgcagagtccagtggtgacatggatgttctcctgacccatcccagcttcacttcagaatcaaccaaacagccaaaactgttacatcaggttgtggagcagttacaaaaggttcattttatcacagataccctgtcaaagggtgagacaaagttcatgggtgtttgccagcttcccagtaaaaatgatgaaaaagaatatccacacagaagaattgatatcaggttgatacccaaagatcagtattactgtggtgttctctatttcactgggagtgatattttcaataagaatatgagggctcatgccctagaaaagggtttcacaatcaatgagtacaccatccgtcccttgggagtcactggagttgcaggagaacccctgccagtggatagtgaaaaagacatctttgattacatccagtggaaataccgggaacccaaggaccggagcgaatgaggcctgtatcctccctggcagacacaacccaataggagtcttaatttatttcttaacctttgctatgtaagggtctttggtgtttttaaatgattgtttcttcttcatgcttttgcttgcaatgtagtcaataaaacc

SEQ ID NO: 50 - protein, 335 aa, Homo sapiens
  MYST histone acetyltransferase (monocytic leukemia) 3 (MYST3), monocytic leukemia zinc finger protein (MOZ), zinc finger protein 220 (ZNF220), runt-related transcription factor binding protein 2 (RUNXBP2)
MSKRKAPQETLNGGITDMLTELANFEKNVSQAIHKYNAYRKAASVIAKYPHKIKSGAEAKKLPGVGTKIAEKIDEFLATGKLRKLEKIRQDDTSSSINFLTRVSGIGPSAARKFVDEGIKTLEDLRKNEDKLNHHQRIGLKYFGDFEKRIPREEMLQMQDIVLNEVKKVDSEYIATVCGSFRRGAESSGDMDVLLTHPSFTSESTKQPKLLHQVVEQLQKVHFITDTLSKGETKFMGVCQLPSKNDEKEYPHRRIDIRLIPKDQYYCGVLYFTGSDIFNKNMRAHALEKGFTINEYTIRPLGVTGVAGEPLPVDSEKDIFDYIQWKYREPKDRSE

SEQ ID NO: 51 - DNA, 1413 bp, Homo sapiens
  adaptor-related protein complex 3, mu 2 subunit (AP3M2), clathrin-associated protein AP47 homolog 2 (CLA20)
ggtttgaagaccttcagcgttgccctggcggacagagacaggccctcggggtggaggtctttggtttcataagagcctgagagagatttttctaagatatgtgtaacacaccaacgtactgtgacctaggaaaggctgctaaggatgtcttcaacaaaggatatggctttggcatggtcaagatagacctgaaaaccaagtcttgtagtggagtggaattttctacttctggtcatgcttacactgatacagggaaagcatcaggcaacctagaaaccaaatataaggtctgtaactatggacttaccttcacccagaaatggaacacagacaatactctagggacagaaatctcttgggagaataagttggctgaagggttgaaactgactcttgataccatatttgtaccgaacacaggaaagaagagtgggaaattgaaggcctcctataaacgggattgttttagtgttggcagtaatgttgatatagatttttctggaccaaccatctatggctgggctgtgttggccttcgaagggtggcttgctggctatcagatgagttttgacacagccaaatccaaactgtcacagaataatttcgccctgggttacaaggctgcggacttccagctgcacacacatgtgaacgatggcactgaatttggaggttctatctaccagaaggtgaatgagaagattgaaacatccataaaccttgcttggacagctgggagtaacaacacccgttttggcattgctgctaagtacatgctggattgtagaacttctctctctgctaaagtaaataatgccagcctgattggactgggttatactcagacccttcgaccaggagtcaaattgactttatcagctttaatcgatgggaagaacttcagtgcaggaggtcacaaggttggcttgggatttgaactggaagcttaatgtggtttgaggaaagcatcagatttgtccctggaagtgaagagaaatgaacccactatgttttggccttaaaattcttctgtgaaatttcaaaagtgtgaactttttattcttccaaagaattgtaatcctccccacactgaagtctaggggttgcgaatccctcctgagggagatgcttgaaggcatgcctggaagttgtcatgtttgtgccacgtttcagttcagttctgaagtgttattaaatgtgttcctcagcgacagtgtagcgtcatgttagaggagacgatctgacccaccagtttgtacatcacgtcctgcatgtcccacaccattttttcatgaccttgtaatatactggtctctgtgctatagtggaatctttggttttgcatcatagtaaaataaaataaacccatcacatttggaacataaaaaaaaaaaaaaaaaaaaaaaaaaaaaa

SEQ ID NO: 52 - protein, 283 aa, Homo sapiens
  adaptor-related protein complex 3, mu 2 subunit (AP3M2), clathrin-associated protein AP47 homolog 2 (CLA20)
MCNTPTYCDLGKAAKDVFNKGYGFGMVKIDLKTKSCSGVEFSTSGHAYTDTGKASGNLETKYKVCNYGLTFTQKWNTDNTLGTEISWENKLAEGLKLTLDTIFVPNTGKKSGKLKASYKRDCFSVGSNVDIDFSGPTIYGWAVLAFEGWLAGYQMSFDTAKSKLSQNNFALGYKAADFQLHTHVNDGTEFGGSIYQKVNEKIETSINLAWTAGSNNTRFGIAAKYMLDCRTSLSAKVNNASLIGLGYTQTLRPGVKLTLSALIDGKNFSAGGHKVGLGFELEA

SEQ ID NO: 53 - DNA, 3685 bp, Homo sapiens
  polymerase (DNA directed), beta (POLB), DNA polymerase beta subunit (DNA pol beta)
gcttccggaagcgggcgactcgcagctccacgcgacgccgaggggctccgcgccgggaccgggcgggtgctcggagtttcggggaccgcacgggaccgagggcaggaggagacatcacagctttcccagatcgggaggaaaaatatggaatgtgttttaccgctgactgaacacaaccaaatgaactgtcctgacagtagtttgcaaaccagcagctagcagtttgtccagcctctaacattgtccagcactttccagagcaaactcactgtttacaagaactcttggccttacgaagtttataacctcaagctttgtttatttaaaatattcctgcaaaagaaaagtacccggcacccactttccaaaatggccatggatgagtatttgtggatggtcattttgggtttcatcatagctttcatcttggccttttctgttggtgcaaacgatgttgccaactcctttggtacagccgtgggctctggtgtggtgaccttgaggcaggcatgcattttagcttcaatatttgaaaccaccggctccgtgttactaggcgccaaagtaggagaaaccattcgcaaaggtatcattgacgtgaacctgtacaacgagacggtggagactctcatggctggggaagttagtgccatggttggttccgctgtgtggcagctgattgcttccttcctgaggcttccaatctcaggaacgcactgcattgtgggttctactataggattctcactggtcgcaatcggtaccaaaggtgtgcagtggatggagcttgtcaagattgttgcttcttggtttatatctccactgttgtctggtttcatgtctggcctgctgtttgtactcatcagaattttcatcttaaaaaaggaagaccctgttcccaatggcctccgggcactcccagtattctatgctgctaccatagcaatcaatgtcttttccatcatgtacacaggagcaccagtgctcggccttgttctccccatgtgggccatagccctcatttcctttggtgtcgccctcctgttcgctttttttgtgtggctcttcgtgtgtccgtggatgcggaggaaaataacaggcaaattacaaaaagaaggtgctttatcacgagtatctgacgaaagcctcagtaaggttcaggaagcagagtccccagtatttaaagagctaccaggtgccaaggctaatgatgacagcaccatcccgctcacgggagcagcaggggagacactggggacctcggaaggcacttctgcgggcagccaccctcgggctgcatacggaagagcactgtccatgacccatggctctgtgaaatcgcccatctccaacggcaccttcggcttcgacggccacaccaggagcgacggtcatgtgtaccacaccgtgcacaaagactcggggctctacaaagatctgctgcacaaaatccacatcgacaggggccccgaggagaagccagcccaggaaagcaactaccggctgctgcgccgaaacaacagttacacctgctacaccgcagccatttgtgggctgccagtgcacgccacctttcgagctgcggactcatcggccccagaggacagtgagaagctggtgggcgacaccgtgtcctactccaagaagaggctgcgctacgacagctactcgagctactgtaacgcggtggcagaggcggagatcgaggcggaggagggcggcgtggagatgaagctggcgtcggagctggccgaccctgaccagccgcgagaggaccctgcagaggaggagaaggaggagaaggacgcacccgaggttcacctcctgttccatttcctgcaggtcctcaccgcctgtttcgggtcctttgctcacggcggcaatgacgtgagtaatgccatcggtcccctggtagccttgtggctgatttacaaacaaggcggggtaacgcaagaagcagctacacccgtctggctgctgttttatggaggagttggaatctgcacaggcctctgggtctgggggagaagagtgatccagaccatggggaaggacctcactcccatcacgccgtccagcggcttcacgatcgagctggcctcagccttcacagtggtgatcgcctccaacatcgggcttccagtcagcaccacgcactgtaaggtgggctcggtggtggccgtgggctggatccgctcccgcaaggctgtggactggcgcctctttcggaacatcttcgtggcctggttcgtgaccgtccctgtggctgggctgttcagcgctgctgtcatggctcttctcatgtatgggatccttccatatgtgtgatttgtcttcttccagctgcaaacagctaaagggatggtctggtgttggcgtgtgggagacatgtgtgctcgtgccacacatacacatcctggccgtgcacggctctctcatgaccagctctctgcctcccttccaggaggctccatcccacactgttcacccaggctgcggagactcaccttcccgagctaacttaactactgtacataataatatgtattaaactggtatcgtggtgatataatgtggtgcagttacttatatattaaatatctattgtatccatagaataggcagcattatttcaaacatattcaagttgggagtggagatcattgcctagaagtcaatattcaataaatcttgtacataactatttcgatggcaaatgttaagccttctaaaaggaaagtgtagattggaaaatgattttttttccaaatgatgtttttgccttctaatatactgtaaggtaatgagcttcagaacaggcaacctgaccctgcagaggtcgcgtgctgtgggatgacagcgggacgggagctcacaagtgctttcactgaagatttgttcatatactgtgtattgattgttgtgtaatatatcatcattgcttttgtaaatacgtaaaactgtaattttttaatggtgtgcttcccttatacttttttgatcagagaattttggaaagtaccaaagaagcaggggaatcattggccagtgttacgttttcacattgtctgtctcccaccctcactgatcacgcctgccccagagcagtgtgtggcggtgacaccgtcacccagcatgcgccacgccgtggctcccaccagcagtgccaccgccaccacaccccagatcccacccaccttgcagtggcctttccttgtcatcagagtagagaatgcacaggtgttggtgagggcgtgtggctgagcactacatgtcaagtccagagtcagtttctatcccaattctccctgcagcctgaagaacggatccttgtctccaatgtcagcacaaaggaggctttttctgtgctttgacattctagcacttcagggatgagagggagggagaatcctggatgctggatggagtatttctctgaggcccacacaaagctggacacccccaggctctactccatcccattggagtctcttctttttttgatagcgggagggaggaagtacgactaatgttggagcctgaaactatggaaatgctgctaaaatttttatattgacaaacattttcttggtacttcattgtcatttttcattaatcaaccatattaaatttataataaaaaatgcccctcagaaaaaaaaaaaaaaagaaaaaaaaaaaaaaa

SEQ ID NO: 54 - protein, 652 aa, Homo sapiens
  polymerase (DNA directed), beta (POLB), DNA polymerase beta subunit (DNA pol beta)
MAMDEYLWMVILGFIIAFILAFSVGANDVANSFGTAVGSGVVTLRQACILASIFETTGSVLLGAKVGETIRKGIIDVNLYNETVETLMAGEVSAMVGSAVWQLIASFLRLPISGTHCIVGSTIGFSLVAIGTKGVQWMELVKIVASWFISPLLSGFMSGLLFVLIRIFILKKEDPVPNGLRALPVFYAATIAINVFSIMYTGAPVLGLVLPMWAIALISFGVALLFAFFVWLFVCPWMRRKITGKLQKEGALSRVSDESLSKVQEAESPVFKELPGAKANDDSTIPLTGAAGETLGTSEGTSAGSHPRAAYGRALSMTHGSVKSPISNGTFGFDGHTRSDGHVYHTVHKDSGLYKDLLHKIHIDRGPEEKPAQESNYRLLRRNNSYTCYTAAICGLPVHATFRAADSSAPEDSEKLVGDTVSYSKKRLRYDSYSSYCNAVAEAEIEAEEGGVEMKLASELADPDQPREDPAEEEKEEKDAPEVHLLFHFLQVLTACFGSFAHGGNDVSNAIGPLVALWLIYKQGGVTQEAATPVWLLFYGGVGICTGLWVWGRRVIQTMGKDLTPITPSSGFTIELASAFTVVIASNIGLPVSTTHCKVGSVVAVGWIRSRKAVDWRLFRNIFVAWFVTVPVAGLFSAAVMALLMYGILPYV

SEQ ID NO: 55 - DNA, 2189 bp, Homo sapiens
  voltage-dependent anion channel 3 (VDAC3), transcript variant 2
gaggttgaagctgcctccgccatcttggagatgggagacgggcgatggctgtggtccttctgctaatgcaaacaacaaaacgggcacactagtcacccccgagggaggccaccatcactgtaactgttggccaaagctacaaaagaagcgagggaatccaaccgagcgcagcgacactgagaacagcttcccctgccttctgcggcggcagaagtgaagtgcctgaggaccggaaggatggtgcagtcctgctccgcctacggctgcaagaaccgctacgacaaggacaagcccgtttctttccacaagtttcctcttactcgacccagtctttgtaaagaatgggaggcagctgtcagaagaaaaaactttaaacccaccaagtatagcagtatttgttcagagcactttactccagactgctttaagagagagtgcaacaacaagttactgaaagagaatgctgtgcccacaatatttctttgtactgagccacatgacaagaaagaagatcttctggagccacaggaacagcttcccccacctcctttaccgcctcctgtttcccaggttgatgctgctattggattactaatgccgcctcttcagacccctgttaatctctcagttttctgtgaccacaactatactgtggaggatacaatgcaccagcggaaaaggattcatcagctagaacagcaagttgaaaaactcagaaagaagctcaagaccgcacagcagcgatgcagaaggcaagaacggcagcttgaaaaattaaaggaggttgttcacttccagaaagagaaagacgacgtatcagaaagaggttatgtgattctaccaaatgactactttgaaatagttgaagtaccagcataaaaaaatgaaatgtgtattgatttctaatggggcaataccacatatcctcctctagcctgtaaaggagtttcatttaaaaaaataacatttgattacttatataaaaacagttcagaatatttttttaaaaaaaattctatatatactgtaaaattataaatttttttgtttgtaatttcaggttttttacattttaacaaaatattttaaaagttataaactaacctcagacctctaatgtaagttggtttcaagattggggattttggggtttttttttagtatttatagaaataatgtaaaaataaaaagtaaagagaatgagaacagtgtggtaaaagggtgatttcagtttaaaacttaaaattagtactgttttattgagagaatttagttatattttaaatcagaagtatgggtcagatcatgggacataacttcttagaatatatatatacatatgtacatattctcatatgtaaagtcacaaggttcatttatctttctgaatcagttatcaaagataaattggcaagtcagtacttaagaaaaaagatttgattatcatcacagcagaaaaaagtcattgcatatctgatcaataacttcagattctaagagtggattttttttttttacatgggctcctattttttcccctactgtcttgcattataaaattagaagtgtattttcagtggaagaaacatttttcaataaataaagtaaggcattgtcatcaatgaagtaattaaaactgggacctgatctatgatacgcttttttctttcattacaccctagctgaaggacatccagttccccagctgtagttatgtatctgccttcaagtctctgacaaatgtgctgtgttagtagagtttgatttgtatcatatgataatcttgcacttgactgagttgggacaaggcttcacataaaaaattatttcttcacttttaacacaagttagaaattatatcccatttagttaaatgcgtgatttatattcagaacaacctactatgtagcgtttattttactgaatgtggagatttaaacactgaggtttctgttcaaactgtgagttctgttctttgtgagaaattttacatatattggaagtgaaaatatgttctgagtaaacaaatattgctatgggagttatctttttagatttagaataactgttccaatgataattattacttttatatttcaaagtacactaagatcgttgaagagcaatagaacctttaagacagtattaaaggtgtgaaacaatggcaaaaaaaaaaaaaaaaaaaaaaa

SEQ ID NO: 56 - protein, 213 aa, Homo sapiens
  voltage-dependent anion channel 3 (VDAC3), isoform b
MVQSCSAYGCKNRYDKDKPVSFHKFPLTRPSLCKEWEAAVRRKNFKPTKYSSICSEHFTPDCFKRECNNKLLKENAVPTIFLCTEPHDKKEDLLEPQEQLPPPPLPPPVSQVDAAIGLLMPPLQTPVNLSVFCDHNYTVEDTMHQRKRIHQLEQQVEKLRKKLKTAQQRCRRQERQLEKLKEVVHFQKEKDDVSERGYVILPNDYFEIVEVPA

SEQ ID NO: 57 - DNA, 1710 bp, Homo sapiens
  solute carrier family 20 (phosphate transporter), member 2 (SLC20A2)
gggaggggcggggcctccgccaccacctcagctgcggaccgaggcgagatggcggccaccgagggggtcggggaggctgcgcaagggggcgagcccgggcagccggcgcaacccccgccccagccgcacccaccgccgccccagcagcagcacaaggaagagatggcggccgaggctggggaagccgtggcgtcccccatggacgacgggtttgtgagcctggactcgccctcctatgtcctgtacagggacagagcagaatgggctgatatagatccggtgccgcagaatgatggccccaatcccgtggtccagatcatttatagtgacaaatttagagatgtttatgattacttccgagctgtcctgcagcgtgatgaaagaagtgaacgagcttttaagctaacccgggatgctattgagttaaatgcagccaattatacagtgtggcatttccggagagttcttttgaagtcacttcagaaggatctacatgaggaaatgaactacatcactgcaataattgaggagcagcccaaaaactatcaagtttggcatcataggcgagtattagtggaatggctaagagatccatctcaggagcttgaatttattgctgatattcttaatcaggatgcaaagaattatcatgcctggcagcatcgacaatgggttattcaggaatttaaactttgggataatgagctgcagtatgtggaccaacttctgaaagaggatgtgagaaataactctgtctggaaccaaagatacttcgttatttctaacaccactggctacaatgatcgtgctgtattggagagagaagtccaatacactctggaaatgattaaactagtaccacataatgaaagtgcatggaactatttgaaagggattttgcaggatcgtggtctttccaaatatcctaatctgttaaatcaattacttgatttacaaccaagtcatagttccccctacctaattgcctttcttgtggatatctatgaagacatgctagaaaatcagtgtgacaataaggaagacattcttaataaagcattagagttatgtgaaatcctagctaaagaaaaggacactataagaaaggaatattggagatacattggaagatcccttcaaagcaaacacagcacagaaaatgactcaccaacaaatgtacagcaataacaccatccagaagaacttgatggaatgcttttattttttattaagggaccctgcaggagtttcacacgagagtggtccttccctttgcctgtggtgtaaaagtgcatcacacaggtattgctttttaacaagaactgatgctccttgggtgctgctgctactcagactagctctaagtaatgtgattcttctaaagcaaagtcattggatgggaggaggaagaaaaagtcccataaaggaacttttgtagtcttatcaacatataatctaatcccttagcatcagctcctccctcagtggtacatgcgtcaagatttgtagcagtaataactgcaggtcacttgtatgtaatggatgtgaggtagccgaagtttggttcagtaagcagggaatacagtcgttccatcagagctggtctgcacactcacattatcttgctatcactgtaaccaactaatgccaaaagaacggttttgtaataaaattatagctgtatctaaaaacaaaaaaaaaaaaaaaaaa

SEQ ID NO: 58 - protein, 379 aa, Homo sapiens
  solute carrier family 20 (phosphate transporter), member 2 (SLC20A2)
MAATEGVGEAAQGGEPGQPAQPPPQPHPPPPQQQHKEEMAAEAGEAVASPMDDGFVSLDSPSYVLYRDRAEWADIDPVPQNDGPNPVVQIIYSDKFRDVYDYFRAVLQRDERSERAFKLTRDAIELNAANYTVWHFRRVLLKSLQKDLHEEMNYITAIIEEQPKNYQVWHHRRVLVEWLRDPSQELEFIADILNQDAKNYHAWQHRQWVIQEFKLWDNELQYVDQLLKEDVRNNSVWNQRYFVISNTTGYNDRAVLEREVQYTLEMIKLVPHNESAWNYLKGILQDRGLSKYPNLLNQLLDLQPSHSSPYLIAFLVDIYEDMLENQCDNKEDILNKALELCEILAKEKDTIRKEYWRYIGRSLQSKHSTENDSPTNVQQ

SEQ ID NO: 59 - DNA, 165 bp, Homo sapiens
  THAP domain containing, apoptosis associated protein 1 (THAP1), transcript variant 1, FLJ10477
atggccacccaggaaatggaacagggagaaaaggatccagaaactgatgagcacagggaaagaaaaccttttgcagaaacagatgaggaagacaagggggttgatgtagagaagctacaagtaattgcagctgccattaaacagggtcttgctgcaaaaagataa

SEQ ID NO: 60 - protein, 54 aa, Homo sapiens
  THAP domain containing, apoptosis associated protein 1 (THAP1), transcript variant 1, FLJ10477
MATQEMEQGEKDPETDEHRERKPFAETDEEDKGVDVEKLQVIAAAIKQGLAAKR

SEQ ID NO: 61 - DNA, 4304 bp, Homo sapiens
  similar to family with sequence similarity 9, member C (LOC441347)
cacacggactacaggggagttttgttgaagttgcaaagtcctggagcctccagagggctgtcggcgcagtagcagcgagcagcagagtccgcacgctccggcgaggggcagaagagcgcgagggagcgcggggcagcagaagcgagagccgagcgcggacccagccaggacccacagccctccccagctgcccaggaagagccccagccatggaacaccagctcctgtgctgcgaagtggaaaccatccgccgcgcgtaccccgatgccaacctcctcaacgaccgggtgctgcgggccatgctgaaggcggaggagacctgcgcgccctcggtgtcctacttcaaatgtgtgcagaaggaggtcctgccgtccatgcggaagatcgtcgccacctggatgctggaggtctgcgaggaacagaagtgcgaggaggaggtcttcccgctggccatgaactacctggaccgcttcctgtcgctggagcccgtgaaaaagagccgcctgcagctgctgggggccacttgcatgttcgtggcctctaagatgaaggagaccatccccctgacggccgagaagctgtgcatctacaccgacaactccatccggcccgaggagctgctgcaaatggagctgctcctggtgaacaagctcaagtggaacctggccgcaatgaccccgcacgatttcattgaacacttcctctccaaaatgccagaggcggaggagaacaaacagatcatccgcaaacacgcgcagaccttcgttgccctctgtgccacagatgtgaagttcatttccaatccgccctccatggtggcagcggggagcgtggtggccgcagtgcaaggcctgaacctgaggagccccaacaacttcctgtcctactaccgcctcacacgcttcctctccagagtgatcaagtgtgacccggactgcctccgggcctgccaggagcagatcgaagccctgctggagtcaagcctgcgccaggcccagcagaacatggaccccaaggccgccgaggaggaggaagaggaggaggaggaggtggacctggcttgcacacccaccgacgtgcgggacgtggacatctgagggcgccaggcaggcgggcgccaccgccacccgcagcgagggcggagccggccccaggtgctcccctgacagtccctcctctccggagcattttgataccagaagggaaagcttcattctccttgttgttggttgttttttcctttgctctttcccccttccatctctgacttaagcaaaagaaaaagattacccaaaaactgtctttaaaagagagagagagaaaaaaaaaatagtatttgcataaccctgagcggtgggggaggagggttgtgctacagatgatagaggattttataccccaataatcaactcgtttttatattaatgtacttgtttctctgttgtaagaataggcattaacacaaaggaggcgtctcgggagaggattaggttccatcctttacgtgtttaaaaaaaagcataaaaacattttaaaaacatagaaaaattcagcaaaccatttttaaagtagaagagggttttaggtagaaaaacatattcttgtgcttttcctgataaagcacagctgtagtggggttctaggcatctctgtactttgcttgctcatatgcatgtagtcactttataagtcattgtatgttattatattccgtaggtagatgtgtaacctcttcaccttattcatggctgaagtcacctcttggttacagtagcgtagcgtgcccgtgtgcatgtcctttgcgcctgtgaccaccaccccaacaaaccatccagtgacaaaccatccagtggaggtttgtcgggcaccagccagcgtagcagggtcgggaaaggccacctgtcccactcctacgatacgctactataaagagaagacgaaatagtgacataatatattctatttttatactcttcctatttttgtagtgacctgtttatgagatgctggttttctacccaacggccctgcagccagctcacgtccaggttcaacccacagctacttggtttgtgttcttcttcatattctaaaaccattccatttccaagcactttcagtccaataggtgtaggaaatagcgctgtttttgttgtgtgtgcagggagggcagttttctaatggaatggtttgggaatatccatgtacttgtttgcaagcaggactttgaggcaagtgtgggccactgtggtggcagtggaggtggggtgtttgggaggctgcgtgccagtcaagaagaaaaaggtttgcattctcacattgccaggatgataagttcctttccttttctttaaagaagttgaagtttaggaatcctttggtgccaactggtgtttgaaagtagggacctcagaggtttacctagagaacaggtggtttttaagggttatcttagatgtttcacaccggaaggtttttaaacactaaaatatataatttatagttaaggctaaaaagtatatttattgcagaggatgttcataaggccagtatgatttataaatgcaatctccccttgatttaaacacacagatacacacacacacacacacacacacaaaccttctgcctttgatgttacagatttaatacagtttatttttaaagatagatccttttataggtgagaaaaaaacaatctggaagaaaaaaaccacacaaagacattgattcagcctgtttggcgtttcccagagtcatctgattggacaggcatgggtgcaaggaaaattagggtactcaacctaagttcggttccgatgaattcttatcccctgccccttcctttaaaaaacttagtgacaaaatagacaatttgcacatcttggctatgtaattcttgtaatttttatttaggaagtgttgaagggaggtggcaagagtgtggaggctgacgtgtgagggaggacaggcgggaggaggtgtgaggaggaggctcccgaggggaaggggcggtgcccacaccggggacaggccgcagctccattttcttattgcgctgctaccgttgacttccaggcacggtttggaaatattcacatcgcttctgtgtatctctttcacattgtttgctgctattggaggatcagttttttgttttacaatgtcatatactgccatgtactagttttagttttctcttagaacattgtattacagatgccttttttgtagttttttttttttttatgtgatcaattttgacttaatgtgattactgctctattccaaaaaggttgctgtttcacaatacctcatgcttcacttagccatggtggacccagcgggcaggttctgcctgctttggcgggcagacacgcgggcgcgatcccacacaggctggcgggggccggccccgaggccgcgtgcgtgagaaccgcgccggtgtccccagagaccaggctgtgtccctcttctcttccctgcgcctgtgatgctgggcacttcatctgatcgggggcgtagcatcatagtagtttttacagctgtgttattctttgcgtgtagctatggaagttgcataattattattattattattataacaagtgtgtcttacgtgccaccacggcgttgtacctgtaggactctcattcgggatgattggaatagcttctggaatttgttcaagttttgggtatgtttaatctgttatgtactagtgttctgtttgttattgttttgttaattacaccataatgctaatttaaagagactccaaatctcaatgaagccagctcacagtgctgtgtgccccggtcacctagcaagctgccgaaccaaaagaatttgcaccccgctgcgggcccacgtggttggggccctgccctggcagggtcatcctgtgctcggaggccatctcgggcacaggcccaccccgccccacccctccagaacacggctcacgcttacctcaaccatcctggctgcggcgtctgtctgaaccacgcgggggccttgagggacgctttgtctgtcgtgatggggcaagggcacaagtcctggatgttgtgtgtatcgagaggccaaaggctggtggcaagtgcacggggcacagcggagtctgtcctgtgacgcgcaagtctgagggtctgggcggcgggcggctgggtctgtgcatttctggttgcaccgcggcgcttcccagcaccaacatgtaaccggcatgtttccagcagaagacaaaaagacaaacatgaaagtctagaaataaaactggtaaaaccccaaaaaaaaaaaaaaaa

SEQ ID NO: 62 - protein, 295 aa, Homo sapiens
  similar to family with sequence similarity 9, member C (LOC441347)
MEHQLLCCEVETIRRAYPDANLLNDRVLRAMLKAEETCAPSVSYFKCVQKEVLPSMRKIVATWMLEVCEEQKCEEEVFPLAMNYLDRFLSLEPVKKSRLQLLGATCMFVASKMKETIPLTAEKLCIYTDNSIRPEELLQMELLLVNKLKWNLAAMTPHDFIEHFLSKMPEAEENKQIIRKHAQTFVALCATDVKFISNPPSMVAAGSVVAAVQGLNLRSPNNFLSYYRLTRFLSRVIKCDPDCLRACQEQIEALLESSLRQAQQNMDPKAAEEEEEEEEEVDLACTPTDVRDVDI

SEQ ID NO: 63 - DNA, 1548 bp, Homo sapiens
  cyclin D1 (CCND1), parathyroid adenomatosis 1 (PRAD1)
gacctttcagagccaggagggctttcgggggcgtggggcgcgctgcggagcggagccgcggctcgacggcggtgcgctggcggcgagtgtatgcagacggcgcccggcccgaaccccgagccccgcggggctccccacccgccggcctcccgcccctcccgcgcctccgcctggggaccacgtcggccttttgttggcgaaccgtcctttctttcagcgctttgcgcagcaacggaaatttcattgctcctgggtggaaattaaagggactcgcgttccctctctccctctccctctcccactctccctctctttctctctctcgcccacccttcccccttcttcccccacctttcccgcgaagccggagtcagcatctccaggcgcgggatcccgctccgagcacctcgcagctgtccggctgccgccccttccatgggcgccgcgctcgcctgcagccgccgccgccgcggggcgggcgcgatgccacgatgggcctaatctggctgctactgctcagcctgctggagcccggctggcccgcagcgggccctggggcgcggttgcggcgcgatgcgggcggccgtggcggcgtctacgagcaccttggcggggcgccccggcgccgcaagctctactgcgccacgaagtaccacctccagctgcacccgagcggccgcgtcaacggcagcctggagaacagcgcctacagtattttggagataacggcagtggaggtgggcattgtggccatcaggggtctcttctccgggcggtacctggccatgaacaagaggggacgactctatgcttcggagcactacagcgccgagtgcgagtttgtggagcggatccacgagctgggctataatacgtatgcctcccggctgtaccggacggtgtctagtacgcctggggcccgccggcagcccagcgccgagagactgtggtacgtgtctgtgaacggcaagggccggccccgcaggggcttcaagacccgccgcacacagaagtcctccctgttcctgccccgcgtgctggaccacagggaccacgagatggtgcggcagctacagagtgggctgcccagaccccctggtaagggggtccagccccgacggcggcggcagaagcagagcccggataacctggagccctctcacgttcaggcttcgagactgggctcccagctggaggccagtgcgcactagctgggcctggtggccaccgccagagctcctggcgacatcttggcgtggcagcctcttgactctgactctcctccttgagcccttgcccctgcgtcccgcgtctgggttctcagctatttccagagccagctcaaatcagggtccagtgggaactgaagagggcccaagtcggagctcggagggggctgcctgcaatgcagggcatttgtgggtctgtgtggcaggaagccggcagggaagggcctgagtgccagccctggcagactgaggagcctcccaggagcagcggggcagtgtggggctttgtgtcatcacaacattaaagtattttattcta

SEQ ID NO: 64 - protein, 239 aa, Homo sapiens
  cyclin D1 (CCND1), parathyroid adenomatosis 1 (PRAD1)
MGLIWLLLLSLLEPGWPAAGPGARLRRDAGGRGGVYEHLGGAPRRRKLYCATKYHLQLHPSGRVNGSLENSAYSILEITAVEVGIVAIRGLFSGRYLAMNKRGRLYASEHYSAECEFVERIHELGYNTYASRLYRTVSSTPGARRQPSAERLWYVSVNGKGRPRRGFKTRRTQKSSLFLPRVLDHRDHEMVRQLQSGLPRPPGKGVQPRRRRQKQSPDNLEPSHVQASRLGSQLEASAH

SEQ ID NO: 65 - DNA, 627 bp, Homo sapiens
  fibroblast growth factor 3 precursor (murine mammary tumor virus integration site (v-int-2, INT2) oncogene homolog) (FGF3)
atggacccgttcctggtgctgctgcactcggtgtcgtccagcctgtcgagcagcgagctgaccgagctcaagttcctatgcctcgggcgcgtgggcaagcgcaagctggagcgcgtgcagagcggcctagacctcttctccatgctgctggagcagaacgacctggagcccgggcacaccgagctcctgcgcgagctgctcgcctccctgcggcgccacgacctgctgcggcgcgtcgacgacttcgaggcgggggcggcggccggggccgcgcctggggaagaagacctgtgtgcagcatttaacgtcatatgtgataatgtggggaaagattggagaaggctggctcgtcagctcaaagtctcagacaccaagatcgacagcatcgaggacagatacccccgcaacctgacagagcgtgtgcgggagtcactgagaatctggaagaacacagagaaggagaacgcaacagtggcccacctggtgggggctctcaggtcctgccagatgaacctggtggctgacctggtacaagaggttcagcaggcccgtgacctccagaacaggagtggggccatgtccccgatgtcatggaactcagacgcatctacctccgaagcgtcttaa

SEQ ID NO: 66 - protein, 208 aa, Homo sapiens
  fibroblast growth factor 3 precursor (murine mammary tumor virus integration site (v-int-2, INT2) oncogene homolog) (FGF3)
MDPFLVLLHSVSSSLSSSELTELKFLCLGRVGKRKLERVQSGLDLFSMLLEQNDLEPGHTELLRELLASLRRHDLLRRVDDFEAGAAAGAAPGEEDLCAAFNVICDNVGKDWRRLARQLKVSDTKIDSIEDRYPRNLTERVRESLRIWKNTEKENATVAHLVGALRSCQMNLVADLVQEVQQARDLQNRSGAMSPMSWNSDASTSEAS

SEQ ID NO: 67 - DNA, 5227 bp, Homo sapiens
  full open reading frame cDNA clone RZPDo834F046D for gene FADD, Fas (TNFRSF6)-associated via death domain
gctcctcctccgctccgccagtgtccggccgcgggccggccttagtgactggggcggcgggccccggggccgcggcgtggggcgggcaggcggacgccggccgcgggctgctttcgtcggctcccaagctctcccggagcgagcagccgcccgcgagccgccgcggagcctcctcgcccgctcccgccggcgagcaagatgatgtgcgaggtgatgccgaccatcagcgaagcagaaggcccccctggaggaggtggaggccatggttccggctccccttcacagccagatgcagattcacattttgaacagttgatggtctccatgctagaagaaagggaccgccttcttgatacactgagagagactcaagaaacgctggccttaacccaggggaagttacacgaggttggtcatgaaagagattccttgcagagacagctcaacacggcacttccacaggagttcgcagcacttactaaagaactcaatgtatgcagggaacagctccttgaaagggaagaagaaattgctgaactgaaagcagaaaggaataacaccaggctgctgttagagcatttggaatgccttgtctccaggcatgagcggtctcttaggatgaccgtggtgaagagacaagcgcagtctccagcaggcgtgtccagcgaagtggaagtgctgaaagcactgaagtccttatttgaacaccacaaagctctggatgaaaaggtgagagagcgattacgagtagcacttgaaagatgtagtttgttagaagaggaattaggtgccacacacaaagagctaatgattcttaaagaacagaataatcagaaaaaaactctaacagatggagtgctggacataaaccatgaacaagaaaatacaccaagcacgagtggaaagagatcttctgatggttctttaagccacgaggaagaccttgctaaagtaattgagctccaagaaatcataagtaagcagtcaagggaacagagccaaatgaaagaacgcctggcttccctttccagtcatgtgacagaactggaagaggatctggacacggctagaaaagatctcatcaaatctgaagaaatgaacacaaaattgcaacgagatgtccgtgaagccatggcccaaaaggaagatatggaagagagaatcactactcttgaaaaacgctacctcgctgcacagcgtgaagccacatctgtgcatgacctcaatgataaacttgaaaatgaaattgcaaataaagattctatgcatcgacagactgaagataaaaaccgccagttacaggagcgcttggaattggcagagcaaaagctgcaacagacactgaggaaggcagagacgctcccggaggtggaggcggagctggcccagagggtggcagcgctttccaaggctgaagagagacacggcaacattgaagaaaggttacgacagatggaagcacagttggaggagaagaatcaagaactgcagcgggcaaggcaaagagaaaaaatgaacgaagaacataataaacgtttatcagacactgttgacaagctgctttcagaatctaatgagaggcttcaacttcatcttaaagagagaatggctgctttggaagataagaactctcttttaagagaagttgaaagtgcaaaaaagcagttagaagaaacacaacacgataaggatcagcttgtcctaaacattgaagcactgagggctgaactagaccacatgagactaagaggtgcttcacttcatcatggccgaccccacttgggcagtgtcccagatttcaggttccccatggcagacggccacacagactcctacagcaccagtgcagtgctgcggcgcccacagaaaggccggctggcagccctgcgagatgagccttccaaggtacaaactcttaatgagcaggattgggaacgtgcccagcaagctagtgtcttggcaaatgtagcacaagcattcgagagtgatgctgacgtgtctgatggtgaagatgacagggacactctcctcagctcagttgacctgctatcgcccagcgggcaggccgacgcgcacacactagccatgatgcttcaggagcagctggacgccatcaacaaagagatcaggttgattcaggaagaaaaagaaaatacagagcagcgggcagaggagattgaaagtcgagttggcagtggaagtctagacaatcttggtcgttttagatcaatgagctccattcccccctaccctgcttcctcgcttgctagctcctcccctccgggcagtgggcgctccaccccacgaaggatccctcacagcccagctcgggaagtggacagactgggcgtcatgacccttttgccaccttccagagaagaggtacgagatgacaagacaaccataaagtgtgaaacctccccgccttcctccccgagagcccttcggttagaccggctgcacaaaggggcgctgcacaccgtcagccacgaggacatcagggacataaggaactccacaggctcccaggatggtcccgtgagcaaccccagcagtagcaacagtagccaggactcgctccacaaagccccaaagaagaaaggcattaagtcctccattggccgcttgtttggcaagaaagaaaagggccgacctggacaaactggcaaagaagcattaggacaagctggtgtttccgagacggataactcatctcaggatgccttgggacttagcaaattggggggacaggctgaaaaaaatcgtaaacttcaaaaaaagcatgaattgctggaggaagcccggagacaaggtttaccttttgcccaatgggacgggccaacggttgtggtctggctagagctctgggttgggatgccagcctggtatgtggctgcctgccgagcaaacgtgaaaagcggggccatcatgtcggccctgtccgacacagagatccagcgtgagattggcatcagcaaccccctgcacaggctgaagctgaggctggccatccaggagatcatgtcgctgaccagcccgtctgccccgcccacatctagaacgacactcgcctatggggacatgaaccacgagtggatcggcaacgagtggctccccagcctgggcctcccccagtaccgcagctacttcatggagtgccttgtagacgccaggatgctggaccacttgaccaagaaagaccttcgagggcagctgaaaatggtcgacagttttcacagaaacagtttccagtgtggaattatgtgcctgagaaggttaaattatgaccggaaagaactggaaagaaaaagagaagaaagtcagagtgaaataaaagacgtgcttgtttggagcaatgatcgagtgattcgctggatcctgtcaattggccttaaagaatatgcaaacaatcttatagagagtggtgttcacggagcacttctggccttagatgaaaccttcgacttcagtgcactggcactgctgttacagatcccgacgcagaacacacaggctcgtgctgtcttggaaagagaatttaacaaccttttggtcatggggactgatagaaggtttgatgaagatgatgataaaagctttaggagagcaccttcatggagaaaaaagtttagaccaaaggacattcgtggcttagctgctgggtcagcagagactctccctgcaaacttccgggtgacttcttctatgtcttccccctctatgcagccaaagaagatgcagatggacggcaatgtatcaggaacacagaggttggattctgctacagtcaggacttactcctgctaaagtctcctgttgtttacccacactacttctacagatgattatgcagcatttgaatccaacaaagactacattttggaatccagtggaatctttaatcttgttaatacttgttatatggaccctaagatattttattacagagtttttaattagtgaaaaattcatgaataccatagagaaaatattttagaatttaatgtttcttatatttatgtaaacttatgactcttcatttatatagttacttactttttcatgtatatccaggctataaatatcctttcaaatcatgttcttatacctaattttagtctttcaaatgaatgtactgtaatgcttgtatgtataaatcctatgaatagagggcttttgtaaattatgcatttattgtaattatcattaattttttaatgataaaccatgacaaaggattttacgtttataaaattatgacagaagccatgtgcattatcctttacggacgcagcctagctctacagcaatcatcctgaaataagcatacctaatttcaagcaattgttgtattttcatgactgaccttaactgtactttttctagcaagagatgctttattctgcagcatgaacagatttaaaatggctggtgttaaatatcagctcctaataagatgtggactgaaaacactatcacaacactatgagaagcccctagcactggttaacgctttcctagcctagtctctggatttggggagcttgtcttcagtggctgagactgtgagctgggagcagttctctcagctggagagactcgggatggggtaacctggggaccagtctagcccctgcaccctcttccctgcctctgctccttgggagcgggtggagagacacccatgtggctccccttagggccagcaccaagcaccacgctctcatcctgcaagtcggcgcacacagtggatgaaggcaggagacccagaaagcagtgcagtgcagctctaataaaggccttatttttcttatgtaaatcatctttttacatttgtttgtaaacatgtttaaagaacgaacctagtgggacatttttagactttgatgctctagccattttggattgtgtaagttgcagatgtggcttttactttttaaatggcatattaacaagccagcaaagtgtgtcagaccatggcgtggtatttattgtgcagcagatccagagacagaggcagcctgtcttttcagttggtttctgcttttaatttacttgtacaattcattgttactgttctgtttttctattaatcttttgtcaacttcctgattatgtaacaaagtatgtacagtctacttttgaactatttttatcacagtattatttattgctttctttcaataaagtactgaagcattttccactgccaaaaaaaaaaaaaaaa

SEQ ID NO: 68 - protein, 1202 aa, Homo sapiens
  full open reading frame cDNA clone RZPDo834F046D for gene FADD, Fas (TNFRSF6)-associated via death domain
MMCEVMPTISEAEGPPGGGGGHGSGSPSQPDADSHFEQLMVSMLEERDRLLDTLRETQETLALTQGKLHEVGHERDSLQRQLNTALPQEFAALTKELNVCREQLLEREEEIAELKAERNNTRLLLEHLECLVSRHERSLRMTVVKRQAQSPAGVSSEVEVLKALKSLFEHHKALDEKVRERLRVALERCSLLEEELGATHKELMILKEQNNQKKTLTDGVLDINHEQENTPSTSGKRSSDGSLSHEEDLAKVIELQEIISKQSREQSQMKERLASLSSHVTELEEDLDTARKDLIKSEEMNTKLQRDVREAMAQKEDMEERITTLEKRYLAAQREATSVHDLNDKLENEIANKDSMHRQTEDKNRQLQERLELAEQKLQQTLRKAETLPEVEAELAQRVAALSKAEERHGNIEERLRQMEAQLEEKNQELQRARQREKMNEEHNKRLSDTVDKLLSESNERLQLHLKERMAALEDKNSLLREVESAKKQLEETQHDKDQLVLNIEALRAELDHMRLRGASLHHGRPHLGSVPDFRFPMADGHTDSYSTSAVLRRPQKGRLAALRDEPSKVQTLNEQDWERAQQASVLANVAQAFESDADVSDGEDDRDTLLSSVDLLSPSGQADAHTLAMMLQEQLDAINKEIRLIQEEKENTEQRAEEIESRVGSGSLDNLGRFRSMSSIPPYPASSLASSSPPGSGRSTPRRIPHSPAREVDRLGVMTLLPPSREEVRDDKTTIKCETSPPSSPRALRLDRLHKGALHTVSHEDIRDIRNSTGSQDGPVSNPSSSNSSQDSLHKAPKKKGIKSSIGRLFGKKEKGRPGQTGKEALGQAGVSETDNSSQDALGLSKLGGQAEKNRKLQKKHELLEEARRQGLPFAQWDGPTVVVWLELWVGMPAWYVAACRANVKSGAIMSALSDTEIQREIGISNPLHRLKLRLAIQEIMSLTSPSAPPTSRTTLAYGDMNHEWIGNEWLPSLGLPQYRSYFMECLVDARMLDHLTKKDLRGQLKMVDSFHRNSFQCGIMCLRRLNYDRKELERKREESQSEIKDVLVWSNDRVIRWILSIGLKEYANNLIESGVHGALLALDETFDFSALALLLQIPTQNTQARAVLEREFNNLLVMGTDRRFDEDDDKSFRRAPSWRKKFRPKDIRGLAAGSAETLPANFRVTSSMSSPSMQPKKMQMDGNVSGTQRLDSATVRTYSC

SEQ ID NO: 69 - DNA, 3243 bp, Homo sapiens
  protein tyrosine phosphatase, receptor type, f polypeptide (PTPRF), interacting protein (liprin), alpha 1 (PPFIA1, liprin-alpha1, LIP1), transcript variant 2
agtagagcctggtgcctgggagcggctggcgcggcggaatccagggccgacccgggccggaccgaccccaggcggcgacggaatcagtccccaatgcctggaaattcctcattggattactgtgttttaaacagaatttcgtgaacagccttttatctccaagcggaaagaaagatgtggaaagcttcagcaggccacgctgtgtccatcgcccaggatgacgcgggggccgatgactgggagaccgaccctgattttgtgaatgatgtgagtgagaaggagcaaagatggggtgccaagacggtgcagggctccgggcaccaggagcatatcaacatacacaagctgagggagaatgtctttcaagagcatcagacccttaaggagaaggaacttgaaacaggaccaaaagcttcccatggctatggagggaaatttggtgtggaacaagaccgaatggataagtcagctgtcggccacgaatatcagtcgaaactttccaagcactgctcgcaggtggactcggtccgtggcttcggaggcaagtttggtgtccagatggacagagttgatcagtctgctgtaggctttgaataccaggggaagactgagaagcatgcctcccagaaagactactccagtggttttggcggcaagtatggcgtgcaggccgaccgagtagacaagagcgcggtgggcttcgactaccagggcaagacggagaagcacgagtcacagagagattactccaaaggtttcggcggcaaatacggtatcgacaaggacaaagtggataagagcgccgttggctttgagtatcaaggcaaaacggagaagcacgagtcccagaaagactatgtgaaagggtttggaggaaaatttggtgtgcagacagacagacaagacaaatgtgcccttggctgggatcaccaggagaaattgcagctgcatgaatcccaaaaagattataagactggttttggaggcaaattcggtgttcagtcggagaggcaggactccgctgctgtggggtttgattacaaggagaagctggccaagcacgagtcccagcaagactactccaaaggattcggcgggaagtatggggtgcagaaggatcggatggataagaatgcgtcaacctttgaggatgtcacccaggtgtcctctgcctaccagaagacagtacctgtcgaagctgtgaccagcaaaacaagtaacatcagagctaactttgaaaacctcgctaaggagaaagagcaggaggacaggcggaaggcggaggcggagagagcccagcggatggccaaggagcggcaggagcaggaagaggccaggaggaagctggaggagcaagccagagccaaaacgcaaacgccccctgtgtcgcccgcacctcagccaaccgaggagaggctgccctcgagccccgtctatgaggatgcggcttccttcaaggcagagctgagctacagaggccctgtgagtgggacggagccggagcccgtgtacagcatggaggccgctgactaccgagaggccagcagccagcagggcctggcctatgccacagaggctgtctatgaaagcgcagaggccccgggccactatcccgcagaggacagcacctacgatgagtacgagaacgatctggggatcacagccgtcgccctgtacgactaccaggctgcgggcgatgatgagatctcatttgaccctgatgacatcatcaccaacatcgagatgattgacgacggctggtggcgcggggtgtgcaagggccggtacgggctcttcccagccaactatgtggagctgcggcagtagggcccccagcccccccccggagctgcgccctggatcctcacactacagatcaggccttctttggttcttgggtggttttgggttttttctgttttttttttttttttttttttttgaaggtggggaggggaatatacacattgcttttatatttaatacttttgctgatgcttttgaaaatgtttatgccacagaatttgctaatatattgtaatcacattccttaggaggactttggtaattggttttatgcattgatggttttttttttcttttttgccaaattgactgtcacgcggcagcttcagggagctcgcattctcttgtgttcgtgttgccctcgtgcccatcaagtgcagtcgggacctcccaggacaagcacgaggcctcaggtcggccctgtggcgggtaggcaggaaggactgtcccagacgaggggcttcctctagagtctcactgctggggaggagaggactgggcctgatggaagttaacccggagctaagtcacccagagcacaggagctgccatgtcagatgggaaatctgcctatgtcataccgtgacagcccgcaggatcaggtgacttctagcagagaccctggtttttttcctgtgcccactccggcttgtcctcatctctacccatcccctgatgcccaggtcaccgggagggctgctgggagcctctcctgtccccgccgggcagtgtcactgagtccttgaaatcctcccctgccccgcgggtctctggattgggacgcacagtgcagttgaggtctgcgtcgggcttggcttttcacaaaggctgatgtcttaactgtcacccatatggtccctgggccaccgggcagcctggggcggtgtgtgtgccatgtcacagcatggcctctcggccttgggaaggaaggcagtgcctgctctgctgtgagccgccaggaaccctcctcctgtcaatgggggtgtagtatttttgccaaaatatcatgttcaatttcagtagtttgatcagttgaaggctagaagtgtgaagtgcagatgagtgtgtgttcttccccaaggtccccccacagctccaggacaccgctgtcctggcatttgtggccactcactttgtaggaaactcatctccttcctgaggagccgggaggctggaccagtcccgtcgtgcagtcaggtgggcggtgtgtctttccagaaggtcacgtggaaatgtctcgggacttgggtcccggagtgcccgtgaagcgtgtttttgctcctgaggtgcattttctcatcatccttgctttaccacaatgagcaatgaggtcgggttttatatgcaacttattgtatctgaattcctgtagcacacctcataggtatgatttttttaaattaaagaattcagaataaacattttttgatccaaaaa

SEQ ID NO: 70 - protein, 550 aa, Homo sapiens
  protein tyrosine phosphatase, receptor type, f polypeptide (PTPRF), interacting protein (liprin), alpha 1 (PPFIA1, liprin-alpha1, LIP1), isoform b
MWKASAGHAVSIAQDDAGADDWETDPDFVNDVSEKEQRWGAKTVQGSGHQEHINIHKLRENVFQEHQTLKEKELETGPKASHGYGGKFGVEQDRMDKSAVGHEYQSKLSKHCSQVDSVRGFGGKFGVQMDRVDQSAVGFEYQGKTEKHASQKDYSSGFGGKYGVQADRVDKSAVGFDYQGKTEKHESQRDYSKGFGGKYGIDKDKVDKSAVGFEYQGKTEKHESQKDYVKGFGGKFGVQTDRQDKCALGWDHQEKLQLHESQKDYKTGFGGKFGVQSERQDSAAVGFDYKEKLAKHESQQDYSKGFGGKYGVQKDRMDKNASTFEDVTQVSSAYQKTVPVEAVTSKTSNIRANFENLAKEKEQEDRRKAEAERAQRMAKERQEQEEARRKLEEQARAKTQTPPVSPAPQPTEERLPSSPVYEDAASFKAELSYRGPVSGTEPEPVYSMEAADYREASSQQGLAYATEAVYESAEAPGHYPAEDSTYDEYENDLGITAVALYDYQAAGDDEISFDPDDIITNIEMIDDGWWRGVCKGRYGLFPANYVELRQ

SEQ ID NO: 71 - DNA, 2453 bp, Homo sapiens
  cortactin (CTTN), transcript variant 1, ems1 sequence (mammary tumor and squamous cell carcinoma-associated (p80/85 src substrate)) (EMS1)
aacggatgggcggggagggggcggggccgggcaacccggaaggtccggcgtcccagccgcctacctcgctgggaccctggtcttgctgtcccccgctggcctcctgcccaagcgactgcggccaggatgggccggaaggtgaccgtggccacctgcgcactcaaccagtgggccctggacttcgagggcaatttgcaaagaattttaaagagtattgaaattgccaaaaacagaggagcaagatacaggcttggaccagagctggaaatatgcggctacggatgttgggatcattattacgagtcggacaccctcttgcactcgtttcaagtcctagcggcccttgtggagtctcccgtcactcaggacatcatctgcgacgtggggatgcctgtaatgcaccgaaacgtccgctacaactgcagagtgatattcctcaacaggaagatcctgctcatcagacccaagatggccttggccaatgaaggcaactaccgcgagctgcgctggttcaccccgtggtcgaggagtcggcacacagaggagtactttctgcctcggatgatacaggacctgacaaagcaggaaaccgtacccttcggagatgcggtgctggtgacatgggacacctgcattggaagtgagatctgtgaggagctctggacaccccacagcccgcacatcgacatgggcctggatggcgtggagatcatcaccaacgcctcgggcagccaccaagtgctgcgcaaagccaacaccagggtggatctcgtgactatggtcaccagcaagaacggtgggatttacttgctggccaaccagaagggttgtgacggggaccgcctgtactacgacggctgtgccatgattgccatgaacggaagcgtctttgctcaaggatcccagttttctctggatgacgtggaagtcctgacggccacgctggatctggaggacgtccggagctacagggcggagatttcatctcgaaacctggcggccagcagggcgagcccctaccccagagtgaaggtggactttgccctctcgtgccacgaggacttgctggcacccatctctgagcccatcgagtggaaataccacagccctgaggaggagataagccttggacctgcctgctggctctgggattttttaagacgaagtcaacaggcagggtttttgctgcccttgagtggcggggtggacagcgcagccaccgcctgcctcatctactccatgtgctgccaggtctgcgaggccgtgaggagtggaaatgaggaagtgctggctgatgtccgcaccatcgtgaaccagatcagctacaccccccaggatccccgagacctctgtggacgcatactgaccacctgctacatggccagcaagaactcctcccaggagacgtgcacccgggccagagagttggcccagcagattggaagccaccacatcagtctcaacatcgatccagccgtgaaggccgtcatgggcatcttcagcctggtgacggggaagagccctctgtttgcagctcatggaggaagcagcagggaaaacctggcgctgcaaaatgtgcaggctcgaatacggatggtcctcgcctatctgtttgctcagttgagcctctggtctcggggtgtccacggtgggctcctcgtgctgggatccgccaacgtggatgagagtctcctgggctacctgaccaagtacgactgctccagtgcggacatcaaccccataggcgggatcagcaagacggacctcagggccttcgtccagttctgcatccagcgcttccagcttcctgccctgcagagcatcctgttggcgccggccaccgcagagctggagcccttggctgatggacaggtgtcccagaccgacgaggaagatatggggatgacatatgcggagctctcggtctatgggaaactcaggaaggtggccaagatggggccctacagcatgttctgcaaactcctcggcatgtggagacacatctgcaccccgagacaggtcgctgacaaagtgaagcggtttttctccaagtactccatgaacagacacaagatgaccacgctcacacccgcgtaccacgccgagaactacagccctgaggacaacaggtttgatctgcgaccatttctgtacaacacaagctggccttggcagtttcggtgcatagaaaatcaggtgctacagctcgagagggcagagccacagtccctggacggcgtggactgaggccggttccttcctggaggcctcctgtcctcggggaccccagcacctcatcatcagcattgctggagccaagggtaggagccctacactaggagcccaggatgggacggcgcatcagccgagagggagggaacttttcagtcaaattcctcaaaaagaggctggaataaagcctgggcttaaaaaaaaaaaaaaaaaaaaaaaaa

SEQ ID NO: 72 - protein, 706 aa, Homo sapiens
  cortactin (CTTN), isoform a, ems1 sequence (mammary tumor and squamous cell carcinoma-associated (p80/85 src substrate)) (EMS1)
MGRKVTVATCALNQWALDFEGNLQRILKSIEIAKNRGARYRLGPELEICGYGCWDHYYESDTLLHSFQVLAALVESPVTQDIICDVGMPVMHRNVRYNCRVIFLNRKILLIRPKMALANEGNYRELRWFTPWSRSRHTEEYFLPRMIQDLTKQETVPFGDAVLVTWDTCIGSEICEELWTPHSPHIDMGLDGVEIITNASGSHQVLRKANTRVDLVTMVTSKNGGIYLLANQKGCDGDRLYYDGCAMIAMNGSVFAQGSQFSLDDVEVLTATLDLEDVRSYRAEISSRNLAASRASPYPRVKVDFALSCHEDLLAPISEPIEWKYHSPEEEISLGPACWLWDFLRRSQQAGFLLPLSGGVDSAATACLIYSMCCQVCEAVRSGNEEVLADVRTIVNQISYTPQDPRDLCGRILTTCYMASKNSSQETCTRARELAQQIGSHHISLNIDPAVKAVMGIFSLVTGKSPLFAAHGGSSRENLALQNVQARIRMVLAYLFAQLSLWSRGVHGGLLVLGSANVDESLLGYLTKYDCSSADINPIGGISKTDLRAFVQFCIQRFQLPALQSILLAPATAELEPLADGQVSQTDEEDMGMTYAELSVYGKLRKVAKMGPYSMFCKLLGMWRHICTPRQVADKVKRFFSKYSMNRHKMTTLTPAYHAENYSPEDNRFDLRPFLYNTSWPWQFRCIENQVLQLERAEPQSLDGVD

SEQ ID NO: 73 - DNA, 1188 bp, Homo sapiens
  NAD synthetase 1 (NADSYN1), glutamine-dependent NAD synthetase
gaattccacaaggaaatcatctcaggaggaagggctcatacttggatccagaaaatatcaacatagccaaagaaaaacaatcaagacatacctccaggagctgtgtaacagcaaccggaaagagaaacaatggtgtgttcctatgtgggatataaagagccggggctcagggggctccacacctgcacctccttctcacctgctcctctacctgctccaccctcaatccaccagaaccatgggctgctgtggctgctccggaggctgtggctccagctgtggaggctgtgactccagctgtgggagctgtggctctggctgcaggggctgtggccccagctgctgtgcacccgtctactgctgcaagcccgtgtgctgctgtgttccagcctgttcctgctctagctgtggcaagcggggctgtggctcctgtgggggctccaagggaggctgtggttcttgtggctgctcccagtgcagttgctgcaagccctgctgttgctcttcaggctgtgggtcatcctgctgccagtgcagctgctgcaagccctactgctcccagtgcagctgctgtaagccctgttgctcctcctcgggtcgtgggtcatcctgctgccaatccagctgctgcaagccctgctgctcatcctcaggctgtgggtcatcctgctgccagtccagctgctgcaagccctgctgctcccagtccagatgctgtgtccctgtgtgctaccagtgcaagatctgaggctctagtgggaaacctcaggtagctcctgaagatctgtgctttccaacaagtgactacccttgaagcacatccccttctggatctgaaaagagcccttggctcagggcgtctttttccagcccctgaggaaatggaatgaaccactccctgcccattccctataagaatatcccaagacccaggcaattttgcccctctttcccacatgcccccatatgtctgagccaaactgcactgggggctgccctcatgccaagcaagagcctggaattccccttcttgataattccatgggagacagcaaacccttctttcctttgcctgccaggagcttcacgacatttgcagatggatgtcctgcaacccaaatgatcacatgtatctatggaaatccaaaatgcatctgggtgcagcactaaataaattctccatccctc

SEQ ID NO: 74 - protein, 169 aa, Homo sapiens
  NAD synthetase 1 (NADSYN1), glutamine-dependent NAD synthetase
MGCCGCSGGCGSSCGGCDSSCGSCGSGCRGCGPSCCAPVYCCKPVCCCVPACSCSSCGKRGCGSCGGSKGGCGSCGCSQCSCCKPCCCSSGCGSSCCQCSCCKPYCSQCSCCKPCCSSSGRGSSCCQSSCCKPCCSSSGCGSSCCQSSCCKPCCSQSRCCVPVCYQCKI

SEQ ID NO: 75 - DNA, 858 bp, Homo sapiens
  keratin associated protein 5-9 (KRTAP5-9), keratin, cuticle, ultrahigh sulphur 1 (KRN1)
agagcctggacctacagcgctgttggtggaggtcctgcctccaggaatagatggacatggcctggcagatgatgcagctgctgcttctggctttggtgactgctgcggggagtgcccagcccaggagtgcgcgggccaggacggacctgctcaatgtctgcatgaacgccaagcaccacaagacacagcccagccccgaggacgagctgtatggccagtgcagtccctggaagaagaatgcctgctgcacggccagcaccagccaggagctgcacaaggacacctcccgcctgtacaactttaactgggatcactgtggtaagatggaacccacctgcaagcgccactttatccaggacagctgtctctatgagtgctcacccaacctggggccctggatccggcaggtcaaccagagctggcgcaaagagcgcattctgaacgtgcccctgtgcaaagaggactgtgagcgctggtgggaggactgtcgcacctcctacacctgcaaaagcaactggcacaaaggctggaattggacctcagggattaatgagtgtccggccggggccctctgcagcacctttgagtcctacttccccactccagccgccctttgtgaaggcctctggagccactccttcaaggtcagcaactatagtcgagggagcggccgctgcatccagatgtggtttgactcagcccagggcaaccccaatgaggaggtggccaagttctatgctgcggccatgaatgctggggccccgtctcgtgggattattgattcctgatccaagaagggtcctctggggttcttccaacaacctattctaatagacaaatccacatgaaaaaaaaaaa

SEQ ID NO: 76 - protein, 245 aa, Homo sapiens
  keratin associated protein 5-9 (KRTAP5-9), keratin, cuticle, ultrahigh sulphur 1 (KRN1)
MDMAWQMMQLLLLALVTAAGSAQPRSARARTDLLNVCMNAKHHKTQPSPEDELYGQCSPWKKNACCTASTSQELHKDTSRLYNFNWDHCGKMEPTCKRHFIQDSCLYECSPNLGPWIRQVNQSWRKERILNVPLCKEDCERWWEDCRTSYTCKSNWHKGWNWTSGINECPAGALCSTFESYFPTPAALCEGLWSHSFKVSNYSRGSGRCIQMWFDSAQGNPNEEVAKFYAAAMNAGAPSRGIIDS

SEQ ID NO: 77 - DNA, 2748 bp, Homo sapiens
  folate receptor 3 precursor (gamma) (FOLR3, FR-G)
cttttcgttgccgttacctgtttccggcagtcgacacgctcttcgcttctcggggcttgtctccgtgtcctccgtctcagttgtttctccctctctatcctcctctgtctcagtctccccagccttggggccggtgcctcttccgggcttcggcgaatgagacctgcggacctgcccccgcgccccatggaagaatccccggcgtccagctctgccccgacagagacggaggagccggggtccagtgcagaggtcatggaagaagtgacaacatgctccttcaacagccctctgttccggcaggaagatgacagagggattacctaccggatcccagccctgctctacataccccccacccacaccttcctggcctttgcagagaagcgttctacgaggagagatgaggatgctctccacctggtgctgaggcgagggttgaggattgggcagttggtacagtgggggcccctgaagccactgatggaagccacactaccggggcatcggaccatgaacccctgtcctgtatgggagcagaagagtggttgtgtgttcctgttcttcatctgtgtgcggggccatgtcacagagcgtcaacagattgtgtcaggcaggaatgctgcccgcctttgcttcatctacagtcaggatgctggatgttcatggagtgaggtgagggacttgactgaggaggtcattggctcagagctgaagcactgggccacatttgctgtgggcccaggtcatggcatccagctgcagtcagggagactggtcatccctgcgtatacctactacatcccttcctggttcttttgcttccagctaccatgtaaaaccaggcctcattctctgatgatctacagtgatgacctaggggtcacatggcaccatggtagactcattaggcccatggttacagtagaatgtgaagtggcagaggtgactgggagggctggccaccctgtgctatattgcagtgcccggacaccaaacaggtgccgggcagaggcgctcagcactgaccatggtgaaggctttcagagactggccctgagtcgacagctctgtgagcccccacatggttgccaagggagtgtggtaagtttccggcccctggagatcccacataggtgccaggactctagcagcaaagatgcacccaccattcagcagagctctccaggcagttcactgaggctggaggaggaagctggaacaccgtcagaatcatggctcttgtactcacacccaaccagtaggaaacagagggttgacctaggtatctatctcaaccagacccccttggaggctgcctgctggtcccgcccctggatcttgcactgtgggccctgtggctactctgatctggctgctctggaggaggagggcttgtttgggtgtttgtttgaatgtgggaccaagcaagagtgtgagcagattgccttccgcctgtttacacaccgggagatcctgagtcacctgcagggggactgcaccagccctggtaggaacccaagccaattcaaaagcaattaattggcttaggacccaatttccatagatgcaaatggcagttacagacaggttaacagaagctactgaagtctacagataatcaaaaaacttaatattctgttccctaccttttttcacttttcctcctccaaagagcaaaatgaaaattttgccttagctactgcagtggaaagagcactgaactaggagttggaagacaaggatgtggtcctggctctgccactggcttgcttttggaccttggatgtgtcacctgaactctctggacctcaggtttccatctgtaaaatgagagtattggttctaagatttctcatcttctcatccctaggacaagcatagtgcctgcatgcttcatgatcagtaagtcctggctgcataaaggactctgatgtcaaaatggaaaccaggggacttaccttttcacatgacttacccctcatccgagtgtgaggttacaagcaggtgtcatggcaggaaggaagaccagatctgtatgatttgttccatttttaataacaaaaatatccacacccttttaataatgctcagttctgtaggctctctatcctagaggaattgagcaaaacagaagaatcatgaagtctcctaccttctacagccttgtagttctgcttaccttctcttcctcatccagaaagcatcattttctagggagaacaatgagaatctcaatgccagtagtactggataatagtgcgtattgcttctggtggcattaccctgatgatgggctgaagttcatttattagggtggttcctgatgggaaaaggacatggattaggactttaaaacactggacagaatttcccacagtctttgccctcaaggagttcaccagtttatggggctagaagagcgagaaaattcaagaaaataaatgtagctggtgggagactttgtagatgttgggctatatgttggggtgatggtagctcctgatgtaattttcttagttgcatcttcaatatgcctggagtcgtctgtccaaggcttgtccaggcttctgggtttctctcaagtttgtttttctcaggatattgtcctggcccagctactcctttacctgtgagaagatcttcaccattaggaagatctctagacccccagatctcagaatcaggcctatttgtgtaggcccatggaaatcactacttgtgaagtagagatgcctttttgtctaa

SEQ ID NO: 78 - protein, 461 aa, Homo sapiens
  folate receptor 3 precursor (gamma) (FOLR3, FR-G)
MRPADLPPRPMEESPASSSAPTETEEPGSSAEVMEEVTTCSFNSPLFRQEDDRGITYRIPALLYIPPTHTFLAFAEKRSTRRDEDALHLVLRRGLRIGQLVQWGPLKPLMEATLPGHRTMNPCPVWEQKSGCVFLFFICVRGHVTERQQIVSGRNAARLCFIYSQDAGCSWSEVRDLTEEVIGSELKHWATFAVGPGHGIQLQSGRLVIPAYTYYIPSWFFCFQLPCKTRPHSLMIYSDDLGVTWHHGRLIRPMVTVECEVAEVTGRAGHPVLYCSARTPNRCRAEALSTDHGEGFQRLALSRQLCEPPHGCQGSVVSFRPLEIPHRCQDSSSKDAPTIQQSSPGSSLRLEEEAGTPSESWLLYSHPTSRKQRVDLGIYLNQTPLEAACWSRPWILHCGPCGYSDLAALEEEGLFGCLFECGTKQECEQIAFRLFTHREILSHLQGDCTSPGRNPSQFKSN

SEQ ID NO: 79 - DNA, 2283 bp, Homo sapiens
  sialidase 3 (membrane sialidase) (SIAL3), neuraminidase 3 (ganglioside sialidase) (NEU3)
cggccgcgagttgtgactggagccacgatgcacggccaggcgcggtgagaagccagcccgtagtgcctcccgaaggagcccgggcgcagggagggtcgccctgaggacacggaggccgccaggcaggccaagggccgaggtgactgggctggggcggtagggaaggagcgagtgcgcctggctgcctccgcacggagttgtccctctctgttttcgattgacacaaacacttctccaaaagcggggaaacctaagcaacaacagcaatcaacaccaagatcttcctcctaccctcccctctttcccttctcccgcggtcggccctcgccccctcccccaggcccagcgcgggcgctcggcgcgtccagacccgcggcgcgatgccggcagtttaggatccaaagcttctctgctccttttgttctttccttcccttttttaaaaaaagaggggggaaatcccagtggtgggcagcctggcacgcacacagtcgccctcataccccgacaaaagcagatgcactttgacttctgacagctctacctcaagccccggagaactcagcggcgctttcctcgcaacccgagctcggcgagtcgtcgtcttcttcttctccgtttttatttatttatttccgttcccgccgccgttctcgctgaccttcactcctccgcgggctctgagcagaagggtcgcattctctcccgcctgagacttcttttcctcgccccgggagctcaggcggcgccgctccagcccggggccccgggactccccggctgcacacttcactgagacgcccccccaggccccgatcagcctcgtttcctccaccctactttgatttcctggtgcgagttttggcttgcacggccgagtgtgtgtcctctttttggagagactggggagctcgtgccgattgtcttcaggagtcatcccctgggctctactttgcccctctctctctctgggcctcatcagaccaaaccaaagaccatggttcactgtgccggctgcaaaaggcccatcctggaccgctttctcttgaacgtgctggacagggcctggcacgtcaagtgcgtccagtgctgtgaatgtaaatgcaacctgaccgagaagtgcttctccagggaaggcaaactctactgcaagaacgacttcttccggtgtttcggtaccaaatgcgcaggctgcgctcagggcatctcccctagcgacctggtgcggagagcgcggagcaaagtgtttcacctgaactgcttcacctgcatgatgtgtaacaagcagctctccactggcgaggaactctacatcatcgacgagaataagttcgtctgcaaagaggattacctaagtaacagcagtgttgccaaagagaacagccttcactcggccaccacgggcagtgaccccagtttgtctccggattcccaagacccgtcgcaggacgacgccaaggactcggagagcgccaacgtgtcggacaaggaagcgggtagcaacgagaatgacgaccagaacctgggcgccaagcggcggggaccgcgcaccaccatcaaagccaagcagctggagacgctgaaggccgccttcgctgctacacccaagcccacccgccacatccgcgagcagctggcgcaggagaccggcctcaacatgcgcgtcattcaggtctggttccagaaccggcgctccaaggagcggaggatgaagcagctgagcgccctgggcgcccggcgccacgccttcttccgcagtccgcgccggatgcggccgctggtggaccgcctggagccgggcgagctcatccccaatggtcccttctccttctacggagattaccagagcgagtactacgggcccgggggcaactacgacttcttcccgcaaggccccccgtcctcgcaggcccagacaccagtggacctacccttcgtgccgtcatctgggccgtccgggacgcccctgggtggcctggagcacccgctgccgggccaccacccgtcgagcgaggcgcagcggtttaccgacatcctggcgcacccacccggggactcgcccagccccgagcccagcctgcccgggcctctgcactccatgtcggccgaggtcttcggacccagcccgcccttctcgtcgctgtcggtcaacggtggggcgagctacggaaaccacctgtcccacccccccgaaatgaacgaggcggccgtgtggtagcggggtctcgcacggtctgcggagttcgtggttgtacagaaatgaacctttatttaagaaaaatag

SEQ ID NO: 80 - protein, 406 aa, Homo sapiens
  sialidase 3 (membrane sialidase) (SIAL3), neuraminidase 3 (ganglioside sialidase) (NEU3)
MVHCAGCKRPILDRFLLNVLDRAWHVKCVQCCECKCNLTEKCFSREGKLYCKNDFFRCFGTKCAGCAQGISPSDLVRRARSKVFHLNCFTCMMCNKQLSTGEELYIIDENKFVCKEDYLSNSSVAKENSLHSATTGSDPSLSPDSQDPSQDDAKDSESANVSDKEAGSNENDDQNLGAKRRGPRTTIKAKQLETLKAAFAATPKPTRHIREQLAQETGLNMRVIQVWFQNRRSKERRMKQLSALGARRHAFFRSPRRMRPLVDRLEPGELIPNGPFSFYGDYQSEYYGPGGNYDFFPQGPPSSQAQTPVDLPFVPSSGPSGTPLGGLEHPLPGHHPSSEAQRFTDILAHPPGDSPSPEPSLPGPLHSMSAEVFGPSPPFSSLSVNGGASYGNHLSHPPEMNEAAVW

SEQ ID NO: 81 - DNA, 3766 bp, Homo sapiens
  LIM homeobox 1 (LHX1, LIM1)
cgcaggcgccgtagaactgtggcgctttctgggtaaagatggacgtccacgatctctttcgccggctcggcgcgggggccaaattcgacacgagacgcttctcggcagacgcagctcgattccagataggaaaaaggaaatatgactttgattcttcggaggtgcttcagggactggacttttttggaaacaagaagtctgtcccaggtgtgtgtggagcatcacaaacacatcagaagccccaaaatggagagaaaaaagaagagagcctaactgaaaggaagagggagcagagcaagaaaaaaaggaagacgatgacttcagaaattgcttcccaagaagaaggtgctactatacagtggatgtcatctgtagaagcaaagattgaagacaaaaaagttcagagagaaagtaaactaacttccggaaagttggagaatctcagaaaagaaaagataaacttcttgcggaataaacacaaaattcacgtccaaggaaccgatcttcctgacccaattgctacatttcagcaacttgaccaggaatataaaatcaattctcgactacttcagaacattctagatgcaggtttccaaatgcctacgccaatccaaatgcaagccatcccagttatgctgcatggtcgggaacttctggcttctgctccaactggatctggaaaaacattagcttttagcattcctattttaatgcagctgaaacaacccgcaaataaaggcttcagagccctgattatatcaccaacacgagaacttgccagccagattcacagagagttaataaaaatttctgagggaacaggattcaggatacacatgatccacaaagcagcagtggcagccaagaaatttggacctaaatcatctaaaaagtttgatattcttgtgactactccaaatcgactaatctatttattaaagcaagatccccccggaatcgacctagcaagtgttgagtggcttgtagtagacgaatcagataaactgtttgaagatggcaaaactgggttcagagaccagctggcttccattttcctggcctgcacatcccacaaggtccgaagagctatgttcagtgcaacttttgcatatgatgttgaacagtggtgcaaactcaacctggacaatgtcatcagtgtgtccattggagcaaggaattctgcagtagaaactgtagaacaagagcttctctttgttggatctgagaccggaaaacttctggccatgagagaacttgttaaaaagggtttcaatccacctgttcttgtttttgttcagtccattgaaagggctaaagaactttttcatgagctcatatatgaaggtattaatgtggatgttattcatgcagagagaacacaacaacagagagataacacagtccacagtttcagagcaggaaaaatctgggttctgatttgtacagccttgctagcaagagggattgattttaaaggtgtgaacttggtgatcaactatgactttccaactagctcagtggaatatatccacaggataggtcgaactggaagagcagggaataagggaaaagcaattacatttttcactgaggatgataagccattattaagaagcgttgctaatgttatacagcaggctgggtgtcctgtaccagaatacataaaaggttttcagaaactactaagcaaacaaaagaaaaagatgattaagaaaccattggaaagggagagcattagtacaactccaaaatgtttcttagaaaaagctaaggataaacagaaaaaggtcactggtcagaacagcaagaagaaagtagctcttgaagacaaaagttaaaaacagactttaaaaatactgtcccagaaatgtaattttatgatcccagcatgaatgttattttcatggaatacttgaagtcttacagtcacctgtaccaaacatttgaaatcaactacaagtacatgggactggtgataaatgatcctaaactatcaagtcagtttcaatttgtaggtgccttttttttttcctgtagagatgagggtcttgccatgttgtccaggctggtcttgaactcctgacctcacacaatcctcctgccttagcctcctgagtaactgagattacaggcacaagctgctgcacccagctctgtaggtgacttttaaatgattatacaatggaaataacattcattgacatttctgtggtttgaatccagagagatacttcttatagaaaaacaaatgtttatgctaaaaataacaccaaaatgtggtgaactcttaaggacttttcccttcaagtgtgaaggaaggtgtgatgaatgctgtggagaggcatctggaacagaaattcaaaataaagccttgacattaaataccccttccactgctcactttgtggatggtagcatgagctgtctaccaagaagaaacctgctgctctcttaattttaatatttcctaatttgttgatggccttttgtgttgtgaaccacaacaaagagaggcctcttttgtggctggttattccagttccctgggattttaaattctttggtctattaagtatccttgtattggatacgtaataccttagtgctgtcataatgttgtacaagatcatgatcagcttctccctttcttcattttctgtgatttaaccatgttctttcctgtctctttccatttaagatattttatttgaatactgataaacattttatcctgataaggaagaatgttcttgttacttgatatacctctgtcttcattctcttacagcttatctttccttaggttgatggtgcctcatttaataagtagatctctacttaagctaaaggattatgatcatatggtgttggagactattagctattagatttttctcaaaatatgagttttgtacaatggaatgaaaaagtgacttcatatacgtaagactggtgcctaagaatgacttgaatgttatcagtactaccacagaactataatatacattgccttttctcagcagcatttgaattcaacttatttatttcctctatttgtagctttttgttctagagtcagaacaggtggactttgctttgaatattttagatgggacaaaaattgttcatcttcggaatttatttaaagaaagatctactggtacagggtgtaaaaatacttacaagaatatgatttttttgtttgttcatgcaaacagatcctttacccaatatatattctggaggtaggtatactggtgcaacccatttgccagctgtgtgactttgagtaagttcttaatttctcagagtttcagtgttctcatctataaaattatgtctccaattgtgagtacctagcactgtacctgatacatagtaaactcacaataaatatttcttaaacatagattttgttaggaatacaggcttgataacacagtccttacccttacaatgtaatgttagagataaaggagcaaatagagtcacgcatcacttaatgacagagatatgttctgagaaatgcatcgttaggtgatattgtcattgtgtaaacatcatgttgtttacttccacaaacctagatggtatagcctaccagtacacctaggctatatggtatagtctgttgctcctaggctacaaacccgtatagcatgttactgtcctgcatgctatagacagttggaacatgtagacttgtataaacactgcacacttaacctatactaaatttattgaaaatatttttcttggccaggcg

SEQ ID NO: 82 - protein, 599 aa, Homo sapiens
  LIM homeobox 1 (LHX1, LIM1)
MDVHDLFRRLGAGAKFDTRRFSADAARFQIGKRKYDFDSSEVLQGLDFFGNKKSVPGVCGASQTHQKPQNGEKKEESLTERKREQSKKKRKTMTSEIASQEEGATIQWMSSVEAKIEDKKVQRESKLTSGKLENLRKEKINFLRNKHKIHVQGTDLPDPIATFQQLDQEYKINSRLLQNILDAGFQMPTPIQMQAIPVMLHGRELLASAPTGSGKTLAFSIPILMQLKQPANKGFRALIISPTRELASQIHRELIKISEGTGFRIHMIHKAAVAAKKFGPKSSKKFDILVTTPNRLIYLLKQDPPGIDLASVEWLVVDESDKLFEDGKTGFRDQLASIFLACTSHKVRRAMFSATFAYDVEQWCKLNLDNVISVSIGARNSAVETVEQELLFVGSETGKLLAMRELVKKGFNPPVLVFVQSIERAKELFHELIYEGINVDVIHAERTQQQRDNTVHSFRAGKIWVLICTALLARGIDFKGVNLVINYDFPTSSVEYIHRIGRTGRAGNKGKAITFFTEDDKPLLRSVANVIQQAGCPVPEYIKGFQKLLSKQKKKMIKKPLERESISTTPKCFLEKAKDKQKKVTGQNSKKKVALEDKS

SEQ ID NO: 83 - DNA, 2072 bp, Homo sapiens
  DEAD (Asp-Glu-Ala-Asp) box polypeptide 52 (DDX52), transcript variant 1, ATP-dependent RNA helicase (ROK1)
gttacacacaggcagtggtatctgtgagcagctctgtggactcaaaggttttctccctgagaggcatgacccaggccagctgattcatcagaatcaggatggacgtggtagaggtcgcgggcagttggtgggcacaagagcgagaggacatcattatgaaatacgaaaagggacaccgagctgggctgccagaggacaaggggcctaagccttttcgaagctacaacaacaacgtcgatcatttggggattgtacatgagacggagctgcctcctctgactgcgcgggaggcgaagcaaattcggcgggagatcagccgaaagagcaagtgggtggatatgctgggagactgggagaaatacaaaagcagcagaaagctcatagatcgagcgtacaagggaatgcccatgaacatccggggcccgatgtggtcagtcctcctgaacactgaggaaatgaagttgaaaaaccccggaagataccagatcatgaaggagaagggcaagaagtcatctgagcacatccagcgcatcgaccgggacgtaagcgggacattaaggaagcatatattcttcagggatcgatacggaaccaagcagcgggaactactccacatcctcctggcatatgaggagtacaacccggaggtgggctactgcagggacctgagccacatcgccgccttgttcctcctctatcttcctgaggaggatgcattctgggcactggtgcagctgctggccagtgagaggcactccctgcagggatttcacagcccaaatggcgggaccgtccaggggctccaagaccaacaggagcatgtggtagccacgtcacaacccaagaccatggggcatcaggacaagaaagatctatgtgggcagtgttccccgttaggctgcctcatccggatattgattgacgggatctctctcgggctcaccctgcgcctgtgggacgtgtatctggtagaaggcgaacaggcgctgatgccgataacaagaatcgcctttaaggttcagcagaagcgcctcacgaagacgtccaggtgtggcccgtgggcacgtttttgcaaccggttcgttgatacctgggccagggatgaggacactgtgctcaagcatcttagggcctctatgaagaaactaacaagaaagaagggggacctgccacccccagccaaacccgagcaagggtcgtcggcatccaggcctgtgccggcttcacgtggcgggaagaccctctgcaagggggacaggcaggcccctccaggcccaccagcccggttcccgcggcccatttggtcagcttccccgccacgggcacctcgttcttccacaccctgtcctggtggggctgtccgggaagacacctaccctgtgggcactcagggtgtgcccagcccggccctggctcagggaggacctcagggttcctggagattcctgcagtggaactccatgccccgcctcccaacggacctggacgtagagggcccttggttccgccattatgatttcagacagagctgctgggtccgtgccatatcccaggaggaccagctggccccctgctggcaggctgaacaccctgcggagcgggtgagatcggctttcgctgcacccagcactgattccgaccagggcacccccttcagagctagggacgaacagcagtgtgctcccacctcagggccttgcctctgcggcctccacttggaaagttctcagttccctccaggcttctagaagcatctgggccagggctcatggctggataatttccctaggcttaacaacccaagcaagcttcgcatcctcgttttatttttggttaaacttatgaaaatgtattaagaaagagtgcagctcgagagagattcagagatggaacacaccagaccccagatcacaaagccaaccatgcccagcccctcccagcacccccagccccacgaccatcgttctgaattctgacgacaccgtgagcctgcctttgtacttcaaactcatggaaggataaccaccttcatgttttgaaataaatgtttcctgttgaaatgaaaaaaaaaa

SEQ ID NO: 84 - protein, 549 aa, Homo sapiens [sequence omitted]

SEQ ID NO: 85 - DNA, 2162 bp, Homo sapiens
  TBC1 domain family, member 3 (TBC1D3), Rab GTPase-activating protein PRC17 (PRC17)
ctccttggctatggagaggcggcccccgagccaggccctccgccaccgcccccgggccatggccccccgccgccacccttcctcgcgcggcccggcccgcggggctcccggccgccgcagctgatggtgttccgcaacgtgggtcggccgccggaggaggaggacgtggaggcggccccggagccgggaccctcggaactgctgtgtccccggcaccgctgtgccctggaccccaaggccctgccgccgggcttggcgctcgagcggacctggggcccggcggctggactagaggcgcagttggcggctctggggctcgggcagccggcggggccgggggtcaagacagtcggtgggggttgctgcccgtgtccgtgtcctcctcagccgccccctccgcagccccagccgcctgctgccgccccgcaggccggggaggaccccacggaaacgagcgacgcgctgctggtcctggagggcttggaatcggaggccgagagcctggagactaacagctgctcggaagaggagctcagcagcccgggtcgcggaggaggagggggcggccggcttctgctgcagcccccaggccctgaattacctccggtgcccttcccgctgcaggacttggtccctctggggcgcctgagtagaggggagcagcagcagcagcagcagcagcaacctcccccgcccccgcctcctcccgggcccctccggccactcgcgggtccttctcggaagggctccttcaaaatccgcctcagtcgcctctttcgcaccaagagctgcaacggtggctccggcggtggggatgggaccggcaagaggccttctggagagctggctgcttcagctgcgagcctgacagacatgggaggctctgcgggccgggagctggacgcggggaggaaacccaagttgacaagaactcaaagtgccttttctccggtctccttcagccccctgttcacaggtgaaactgtgtcgcttgtggatgtggacatttctcagcggggcctgacctctccacaccctccaactccccctcctcctccgagaagaagcctcagcctcctagatgatatcagtgggacgctgcctacatctgtccttgtggctccgatggggtcttccttgcagtctttccccctacctccgcctcctccaccccatgccccagatgcatttccccggattgctcccatccgagcagctgaatccctgcacagccaacccccacagcacctccagtgtcccctctaccggcctgactcgagcagctttgcagccagccttcgagagttggagaagtgtggttggtattgggggccaatgaattgggaagatgcagagatgaagctgaaagggaaaccagatggttctttcctggtacgagacagttctgatcctcgttacatcctgagcctcagtttccgatcacagggtatcacccaccacactagaatggagcactacagaggaaccttcagcctgtggtgtcatcccaagtttgaggaccgctgtcaatctgttgtagagtttattaagagagccattatgcactccaagaatggaaagtttctctatttcttaagatccagggttccaggactgccaccaactcctgtccagctgctctatccagtgtcccgattcagcaatgtcaaatccctccagcacctttgcagattccggatacgacagctcgtcaggatagatcacatcccagatctcccactgcctaaacctctgatctcttatatccgaaagttctactactatgatcctcaggaagaggtatacctgtctctaaaggaagcgcagctcatttccaaacagaagcaagaggtggaaccctccacgtagcgaggggctccctgctggtcaccaccaagggcatttggttgccaagctccagctttgaagaaccaaattaagctaccatgaaaagaagaggaaaagtgagggaacaggaaggttgggattctctgtgcagagactttggttccccacgcagccctggggcttggaagaagcacatgaccgtactctgcgtggggctccacctcacacccacccctgggcatcttaggactggaggggctccttggaaaactggaagaagtctcaacactgtttctttttcagaaaaaaaaaaa

SEQ ID NO: 86 - protein, 581 aa, Homo sapiens
  TBC1 domain family, member 3 (TBC1D3), Rab GTPase-activating protein PRC17 (PRC17)
MVFRNVGRPPEEEDVEAAPEPGPSELLCPRHRCALDPKALPPGLALERTWGPAAGLEAQLAALGLGQPAGPGVKTVGGGCCPCPCPPQPPPPQPQPPAAAPQAGEDPTETSDALLVLEGLESEAESLETNSCSEEELSSPGRGGGGGGRLLLQPPGPELPPVPFPLQDLVPLGRLSRGEQQQQQQQQPPPPPPPPGPLRPLAGPSRKGSFKIRLSRLFRTKSCNGGSGGGDGTGKRPSGELAASAASLTDMGGSAGRELDAGRKPKLTRTQSAFSPVSFSPLFTGETVSLVDVDISQRGLTSPHPPTPPPPPRRSLSLLDDISGTLPTSVLVAPMGSSLQSFPLPPPPPPHAPDAFPRIAPIRAAESLHSQPPQHLQCPLYRPDSSSFAASLRELEKCGWYWGPMNWEDAEMKLKGKPDGSFLVRDSSDPRYILSLSFRSQGITHHTRMEHYRGTFSLWCHPKFEDRCQSVVEFIKRAIMHSKNGKFLYFLRSRVPGLPPTPVQLLYPVSRFSNVKSLQHLCRFRIRQLVRIDHIPDLPLPKPLISYIRKFYYYDPQEEVYLSLKEAQLISKQKQEVEPST

SEQ ID NO: 87 - DNA, 2622 bp, Homo sapiens
  suppressor of cytokine signaling 7 (SOCS7), Nck, Ash and phospholipase C binding protein (NAP4)
tctcccctcccgccgcccgggcgagcgacacggctgcggcccccctcccctcccttccctccctccctcccatccccccctccccgagacccaccggaccccgaacccagatggccgaaacgggctccccgtcttaacgatttggcgtctccctcgaccaccacctctttgtgcagcagcccccgggcagaccctgttccgagggcaacgctccccagtccccccacccccgaccccggaatcatgcatcggactacacggatcaaaatcacagagctgaacccccacctcatgtgtgccctctgcggggggtacttcatcgacgccaccactatcgtggagtgcctgcattccttctgcaaaacctgcatcgtgcgctacctggagaccaacaaatactgccccatgtgtgacgtgcaggtccataaaacccggccgctgctgagcatcaggtctgacaaaacacttcaagacattgtctacaaattggtccctgggctttttaaagatgagatgaaacggcggcgggatttctatgcagcgtaccccctgacggaggtccccaacggctccaatgaggaccgcggcgaggtcttggagcaggagaagggggctctgagtgatgatgagattgtcagcctctccatcgaattctacgaaggtgccagggaccgggacgagaagaagggccccctggagaatggggatggggacaaagagaaaacaggggtgcgcttcctgcgatgcccagcagccatgaccgtcatgcatcttgccaagtttctccgcaacaagatggatgtgcccagcaagtacaaggtggaggttctgtacgaggacgagccactgaaggaatactacaccctcatggacatcgcctacatctacccctggcggcggaacgggcctctccccctcaagtaccgtgtccagccagcctgcaagcggctcaccctagccacggtgcccaccccctccgagggcaccaacaccagcggggcgtccgagtgtgagtcagtcagcgacaaggctcccagccctgccaccctgccagccacctcctcctccctgcccagcccagccaccccatcccatggctctcccagttcccatgggcctccagccacccaccctacctcccccactcccccttcgacagccagtggggccaccacagctgccaacgggggtagcttgaactgcctgcagacaccatcctccaccagcagggggcgcaagatgactgtcaacggcgctcccgtgccccccttaacttgaggccagggaccctctcccttcttccagccaagcctctccactccttccactttttctgggcccttttttccacctcttctactttccccagctcttcccaccttgggggtggggggcgggttttataaataaatatatatatatatgtacataggaaaaaccaaatatacatacttattttctatggaccaaccagattaatttaaatgccacaggaaacaaactttatgtgtgtgtgtatgtgtggaaaatggtgttcattttttttggggggggtcttgtgtaatttgctgtttttgggggtgcctggagatgaactggatgggccactggagtctcaataaagctctgcaccatcctcgctgtttcccaaggcaggtggtgtgttgggggccccttcagacccaaagctttaggcatgattccaactggctgcatataggagtcagttagaatcgtttctttctctccccgtttctctccccatcttggctgctgtcctgcctctgaccagtggccgccccccacgttgttgaatgtccagaaattgctaagaacagtgccttttacaaatgcagtttatccctggttctgaggagcaagtgcagggtggaggtggcacctgcatcacctcctcctcttgcagtggaaactttgtgcaaagaatagatagttctgcctctttttttttttttcctgtgtgtgtggcctttgcatcatttatcttgtggaaaagaagattcaggccctgagaggtctcagctcttggaggagggctaaggctttagcattgtgaagcgctgcacccccaccaaccttaccctcaccggggaaccctcactagcaggactggtggtggagtctcacctggggcctagagtggaagtgggggtgggttaacctcacacaagcacagatcccagactttgccagaggcaaacagccttccaattgcccctccacccccagctgaggcccggtcacctggtcaggacagagcaactgcatctaaaagcacaagaagacagaaacctgtaagctctgaccccacccccaccccttgagaggtcagcggaccacctccttagggacagaccctggcaggtcgctgcccaccgagatttcctcaagtgtgcatagatctgagaggagtcgggagtcgagactcgagattccatcatagcgtaggtgtgtggggttgggagccccctgatgggcttgtctgtgtttgcaccttgtcctgtgtctgaggtcctgtgactgtaccctcctttgccctgggacatctgtatctcttggctttgtaataaatgctgcatactttctaaaaaaaaaaaaaaaaaa

SEQ ID NO: 88 - protein, 344 aa, Homo sapiens
  suppressor of cytokine signaling 7 (SOCS7), Nck, Ash and phospholipase C binding protein (NAP4)
MHRTTRIKITELNPHLMCALCGGYFIDATTIVECLHSFCKTCIVRYLETNKYCPMCDVQVHKTRPLLSIRSDKTLQDIVYKLVPGLFKDEMKRRRDFYAAYPLTEVPNGSNEDRGEVLEQEKGALSDDEIVSLSIEFYEGARDRDEKKGPLENGDGDKEKTGVRFLRCPAAMTVMHLAKFLRNKMDVPSKYKVEVLYEDEPLKEYYTLMDIAYIYPWRRNGPLPLKYRVQPACKRLTLATVPTPSEGTNTSGASECESVSDKAPSPATLPATSSSLPSPATPSHGSPSSHGPPATHPTSPTPPSTASGATTAANGGSLNCLQTPSSTSRGRKMTVNGAPVPPLT

SEQ ID NO: 89 - DNA, 784 bp, Homo sapiens
  polycomb group ring finger 2 (PCGF2), zinc finger protein 144 (Mel-18) (ZNF144), ring finger protein 110 (RNF110)
gagcggttgcgcagtgaaggctagacccggtttactggaattgctctggcgatcgaggggtcctagtacaccgcaatcatgtctattatgtcctataacggaggggccgtcatggccatgaaggggaagaactgtgtggccatcgctgcagacaggcgcttcgggatccaggcccagatggtgaccacggacttccagaagatctttcccatgggtgaccggctgtacatcggtctggccgggctcgccactgacgtccagacagttgcccagcgcctcaagttccggctgaacctgtatgagttgaaggaaggtcggcagatcaaaccttataccctcatgagcatggtggccaacctcttgtatgagaaacggtttggcccttactacactgagccagtcattgccgggttggacccgaagacctttaagcccttcatttgctctctagacctcatcggctgccccatggtgactgatgactttgtggtcagtggcacctgcgccgaacaaatgtacggaatgtgtgagtccctctgggagcccaacatggatccggatcacctgtttgaaaccatctcccaagccatgctgaatgctgtggaccgggatgcagtgtcaggcatgggagtcattgtccacatcatcgagaaggacaaaatcaccaccaggacactgaaggcccgaatggactaaccctgttcccagagcccacttttttttctttttttgaaataaaatagcctgtctttcaaaaaaaaaaaaaaaaaaaaaaaaaaaaaaa

SEQ ID NO: 90 - protein, 205 aa, Homo sapiens
  polycomb group ring finger 2 (PCGF2), zinc finger protein 144 (Mel-18) (ZNF144), ring finger protein 110 (RNF110)
MSIMSYNGGAVMAMKGKNCVAIAADRRFGIQAQMVTTDFQKIFPMGDRLYIGLAGLATDVQTVAQRLKFRLNLYELKEGRQIKPYTLMSMVANLLYEKRFGPYYTEPVIAGLDPKTFKPFICSLDLIGCPMVTDDFVVSGTCAEQMYGMCESLWEPNMDPDHLFETISQAMLNAVDRDAVSGMGVIVHIIEKDKITTRTLKARMD

SEQ ID NO: 91 - DNA, 5732 bp, Homo sapiens
  proteasome (prosome, macropain) subunit, beta type, 3 (PSMB3)
ttgcgggaaagagccaaaccctggcgttggggggcccgggcggggagcccctcccgcggtccacagcgacgcctgcccagccctcctccccttccggctccggcacggggccccgaggcgttcggaggccaggcgggtttctgtcaggcccggggaggaggggcgggcggggcggccgctgcctccccgggacgggccgtaccacgcggacggggaggacggggccaggggactgcagggcggctgcaccgcccgggggcggggtgcggagcgggccggcgggctccccggggcggggcgggagggcggggcgtggggcggacggaaccaccggggcggggtgggaggtaacgggacgggcgcgaccatggcgcggtgagggagcgggggtggggatcggtccgggggaggcctgaggccgctggcttgtgcgctgtctccgccgcccccctctttcgccgccgccgccgccgccccgggcatgtcgtccaactgcaccagcaccacggcggtggcggtggcgccgctcagcgccagcaagaccaagaccaagaagaagcatttcgtgtgccagaaagtgaagctattccgggccagcgagccgatcctcagcgtcctgatgtggggggtgaaccacacgatcaatgagctgagcaatgttcctgttcctgtcatgctaatgccagatgacttcaaagcctacagcaagatcaaggtggacaatcatctcttcaataaggagaacctgcccagccgctttaagtttaaggagtattgccccatggtgttccgaaaccttcgggagaggtttggaattgatgatcaggattaccagaattcagtgacgcgcagcgcccccatcaacagtgacagccagggtcggtgtggcacgcgtttcctcaccacctacgaccggcgctttgtcatcaagactgtgtccagcgaggacgtggcggagatgcacaacatcttaaagaaataccaccagtttatagtggagtgtcatggcaacacgcttttgccacagttcctgggcatgtaccgcctgaccgtggatggtgtggaaacctacatggtggttaccaggaacgtgttcagccatcggctcactgtgcatcgcaagtatgacctcaagggttctacggttgccagagaagcgagcgacaaggagaaggccaaggacttgccaacattcaaagacaatgacttcctcaatgaagggcagaagctgcatgtgggagaggagagtaaaaagaacttcctggagaaactgaagcgggacgttgagttcttggcacagctgaagatcatggactacagcctgctggtgggcatccacgacgtggaccgggcagagcaggaggagatggaggtggaggagcgggcagaggacgaggagtgtgagaatgatggggtgggtggcaacctactctgctcctatggcacacctccggacagccctggcaacctcctcagctttcctcggttctttggtcctggggaattcgacccctctgttgacgtctatgccatgaaaagccatgaaagttcccccaagaaggaggtgtatttcatggccatcattgatatcctcacgccatacgatacaaagaagaaagctgcacatgctgccaaaacggtgaaacacggggcaggggccgagatctcgactgtgaaccctgagcagtactccaaacgcttcaacgagtttatgtccaacatcctgacgtagttctcttctaccttcagccagagccagagagctggatatggggtcggggatcgggagttagggagaagggtgtatttgggctagatgggagggtgggagcagagtcgggtttgggagggctttagcaatgagactgcagcctgtgacaccgaaagagactttagctgaagaggagggggatgtgctgtgtgtgcacctgctcacaggatgtaaccccaccttctgcttacccttgattttttctccccatttgacacccaggttaaaaaggggttccctttttggtaccttgtaaccttttaagataccttggggctagagatgacttcgtgggtttatttgggttttgtttctgaaatttcattgctccaggtttgctatttataatcatatttcatcagcctacccaccctccccatctttgctgagctctcagttcccttcaattaaagagatacccggtagacccagcacaagggtccttccagaaccaagtgctatggatgccagattggagaggtcagacacctcgccctgctgcatttgctcttgtctggattaactttgtaatttatggagtattgtgcacaacttcctccacctttcccttggattcaagtgaaaactgttgcattattcctccatcctgtctggaatacaccaggtcaacaccagagatctcagatcagaatcagagatctcagaggggaataagttcatcctcatgggatggtgaggggcaggaaagcggctgggctcttggacacctggttctcagagaaccctgtgatgatcacccaagccccaggctgtcttagcccctggagttcagaagtcctctctgtaaagcctgcctcccactaggtcaagaggaactagagtacctttggatttatcaggaccctcatgtttaaatggttatttccctttgggaaaacttcagaaactgatgtatcaaatgaggccctgtgccctcgatctatttccttcttccttctgacctcctcccaggcactcttacttctagccgaactcttagctctgggcagatctccaagcgcctggagtgctttttagcagagacacctcgttaagctccgggatgaccttgtaggagatctgtctccctgtgcctggagagttacagccagcaaggtgcccccatcttagagtgtggtgtccaaacgtgaggtggcttcctagttacatgaggatgtgatccaggaaatccagtttggaggcttgatgtgggttttgacctggcctcagccttggggctgtttttccttgttgccccgctctagacttttagcagatctgcagcccacaggcttttttggaaggagtggcttcctgcaggtgttccacctgccttcggagcctgccacccaggccctcagaactgagccacaggctgctctggccaggagagaaacagctctgttgttctgcattgggggaggtacattcctgcatcttctcaccccctcaaccaggaactggggatttgggatgagatatggtcagacttgtagataaccccaaagatgtgaagatcgcttgtgaaaccattttgaatgaatagattggtttcctgtggctccctccaaacctggccaagcccagcttccgaagcaggaaccagcactgtctctgtgcctgactcacagcatataggtcaggaaagaatggagacggcattcttggacttcactggggctgctggattggatgggaaaccttctggaagaggcagatgggggtcaaaccactgccttggccccaggaaggggccataggtaggtctgaacaactgccgcaagaccactacatgacttagggaacttgaaaccaactggctcatggagaaaacaaatttgacttgggaaagggattatgtaggaataatgtttggacttgatttccccacgtcataatgaagaatggaagtttggatctgctcctcgtcaggcgcagcatctctgaagcttggaaagctgtcttccagcagcctccgtggcctcgggttcctaccggcttctctgcatttggtctgctgatcatgttgccataatgtgtatggaaagtgtaacacattcttactggttaaagacgactaccaggtatctaacttgtttaacattgagtttgtgtgtgtgtgtgtatgtttgtgtgttttgtatattgtttacattttgagaggtagcattctgtttcaaatgctttttgtttttctgacagtattgttgactgggtcataacattttgagctgtggtttggtggattttcaatttttttttttaaaggtcattcgctgtgctatcttcaaaaccttgagtttggcccccaatttttggcattcaaatgtttaaaagctatttatcttggtttatacaagtttcctttctcttctttttgtcatggtattctatttggtctgcagtttgaatgtagagaaagtggactgatcccccaagcgttgtctgcccccactctttcctccttgggtcccgccattcttttactgggcagtcgagggcattggaggggaagtgactgccctcagcctcactccctggggccatgaagaaaagctaaacagtctcatggcatctcagaataatgttgggtctcccaagaagaaaggtgtaagaataacgacatggctgattaggcgaggccaggatagggctaaggccaggattcctggctggcatccagtcaccccttctcccatccttccccctcttcttccacaagtccgcagccgagacactgtagtctcccagccacagtgatgagtgccctggagactccactgacctctagatgaaggcccctggccctggttcctgttaattaacctctgggtctttgagtcccccagcacaaacttctttcctgtaccctgcggcttggggtcacagggcatgccgggaagccacagctgaggggcgcagactgaagcagtgctccacctctccttctttagctcaggggttgctggtctgtggcaggcgccacgagtggcccctgtggctgttctcagtggcagtctcttaagttcccaccacaggcagctctttatcccctctccctacttgactctttctcttgcctgtgcttttggcctcaaacaggcctgctggtagcgctcagggcgtgaggctacactcctgccctgcctttcctgtcttcatggtctgccagggcataccttggggaggtggaccaaagacccaggactttttgcagtagccagtcctaccccccagttgtctttttaccaattcagggtgggagagaaaactgcagcaccccagcatgtgagttactcaggtgttgggggctagaagggacagtgcgtttaaacaacactcagagctctggccttaaacctgtggccccccaagtctaggagcctcatctcttcctggcagtcatgcgggcaggaggtcctgaaagggaaaacccattcagacaactgttccccaatctaccagccatctgcaggggtcagtgaccgtggccctctccctcctctagaatgtgccacttatgaagagtgccccatggggaaaaggagactcagctgtcccttggcagcttgtgccagtatcccagggcagaagtttccacaggagcctcttgcccttgcgcagagccactgtgagaggcggtgggagccaacacccttgggggagggggcagtactgctcggcacatcccagcatcaggtcagatcattgaaattaaaaaatgtgaattaagttcatatccaccttttggggaagcaggacaaaccaccaccccaccaagtgtgtgacttctccatatcccactgcagtttccattttttaaatgggaattttcaatcccctgtgcttgtctaacgtctgctttaaaaagtttgagaccctgttactgtttgaaaatgcatgcatgttacgatgaatctccaacctgaggaaaaaaataaaactcaaaaagctttgtgta

SEQ ID NO: 92 - protein, 416 aa, Homo sapiens
  proteasome (prosome, macropain) subunit, beta type, 3 (PSMB3)
MSSNCTSTTAVAVAPLSASKTKTKKKHFVCQKVKLFRASEPILSVLMWGVNHTINELSNVPVPVMLMPDDFKAYSKIKVDNHLFNKENLPSRFKFKEYCPMVFRNLRERFGIDDQDYQNSVTRSAPINSDSQGRCGTRFLTTYDRRFVIKTVSSEDVAEMHNILKKYHQFIVECHGNTLLPQFLGMYRLTVDGVETYMVVTRNVFSHRLTVHRKYDLKGSTVAREASDKEKAKDLPTFKDNDFLNEGQKLHVGEESKKNFLEKLKRDVEFLAQLKIMDYSLLVGIHDVDRAEQEEMEVEERAEDEECENDGVGGNLLCSYGTPPDSPGNLLSFPRFFGPGEFDPSVDVYAMKSHESSPKKEVYFMAIIDILTPYDTKKKAAHAAKTVKHGAGAEISTVNPEQYSKRFNEFMSNILT

SEQ ID NO: 93 - DNA, 2024 bp, Homo sapiens
  phosphatidylinositol-5-phosphate 4-kinase, type II, beta (PIP4K2B)
gttgacggctcctgggactagatcccgcgaggtagcccccgaactatttctctacgttttctcttgatcctcccgaaatcttccagatccgcgtagtgaggaatcgtctccaccgtcatggggggcggagacctgaatctgaagaagagctggcacccgcagaccctcaggaatgtggagaaagtgtggaaggccgagcagaagcatgaggctgagcggaagaagattgaggagcttcagcgggagctgcgagaagagagagcccgggaagagatgcagcgctatgcggaggatgttggggccgtcaagaaaaaagaagaaaagttggactggatgtaccagggtcctggtgggatggtgaaccgtgacgagtacctgctggggcgccccattgacaaatatgtttttgagaagatggaggagaaggaggcaggctgctcttctgaaacaggacttctcccaggctctatctttgccccatcaggtgccaattcccttcttgacatggccagcaagatccgggaggacccactcttcatcatcaggaagaaggaggaggagaaaaaacgagaggtattaaataatccagtgaaaatgaagaaaatcaaagaattgttgcaaatgagtctggaaaaaaaggagaagaagaaaaagaaggagaagaaaaagaagcacaagaaacataagcacagaagctcgagtagtgatcgttccagcagcgaggatgagcacagtgcagggagatcacagaagaagatggcaaattcctcccctgttttgtccaaagtccctggatatggcttacaggtccggaactctgaccgtaaccagggtcttcagggtcctctgacagcagagcaaaagagagggcatgggatgaagaaccattccagatccagaagctcctcccactcacccccaagacatgccagcaagaagagcaccagggaagcagggtcccgggacaggaggtctcgatccctgggcagaaggtcacggtccccaagacccagcaaactgcacaactctaaggtgaacaggagagagacaggccaaactaggagcccatcacctaaaaaagaggtctaccaaaggcgacatgctcccggatacaccagaaaactctctgcagaggaattagagcgaaaacggcaagagatgatggaaaacgccaaatggagggaggaggagagactgaacatcctcaagaggcatgctaaggatgaggaacgggagcagaggctagagaagctggactcccgggatgggaagttcatccaccgcatgaagctggagagtgcatctacttcctccctggaggatcgggtgaagcggaatatctactctttacagagaacttcggtagctctggagaagaactttatgaaaagatgaaaactgtcccctctcttattggttttcctgcattttccagggaagctgctgaccccttaattctctttataagagttcaaatgacttctttcacagatgtcaaaccaccagtgttcaaagtgaccctgcttcattgagtcctgaaacagctcacttcctttgagagctagtgtgacttgctttgtgggacactcagtaactttgggttttgactctttaacgggtgggcactggaccatctcggtgggagtgcttgtgccactctggaaggctgttccctggggttgtgatgtttatcatgccacttccttcttacctgtgccaacagacctatttcactgcctcagcgtacaccagacccttcagaaacctctctggtgtcacccagatagattgtgcttactgagacaaatgaacgtttacttgatttagaagataatgtgacagaatgatgtcaggttaggtcaaagccagggagtgacagaatctgggaaatcaaacaatacaaaagccctaaatgaactgttaactatttgatctttggatgtaaaattgtaatgcgtatatgtacaaatgtacatttttacatgcttttaaaaaaggttagcttgaaaaaaaaaaaaaaaaaa

SEQ ID NO: 94 - protein, 425 aa, Homo sapiens
  phosphatidylinositol-5-phosphate 4-kinase, type II, beta (PIP4K2B)
MGGGDLNLKKSWHPQTLRNVEKVWKAEQKHEAERKKIEELQRELREERAREEMQRYAEDVGAVKKKEEKLDWMYQGPGGMVNRDEYLLGRPIDKYVFEKMEEKEAGCSSETGLLPGSIFAPSGANSLLDMASKIREDPLFIIRKKEEEKKREVLNNPVKMKKIKELLQMSLEKKEKKKKKEKKKKHKKHKHRSSSSDRSSSEDEHSAGRSQKKMANSSPVLSKVPGYGLQVRNSDRNQGLQGPLTAEQKRGHGMKNHSRSRSSSHSPPRHASKKSTREAGSRDRRSRSLGRRSRSPRPSKLHNSKVNRRETGQTRSPSPKKEVYQRRHAPGYTRKLSAEELERKRQEMMENAKWREEERLNILKRHAKDEEREQRLEKLDSRDGKFIHRMKLESASTSSLEDRVKRNIYSLQRTSVALEKNFMKR

SEQ ID NO: 95 - DNA, 5809 bp, Homo sapiens
  cDNA FLJ20291 fis, clone HEP04788
gggaagatggcggcggcctcgagcacccttctcttcttgccgccggggacttcagattgatccttcccgggaagagtagggactgctggtgccctgcgtcccgggatcccgagccaacttgtttcctccgttagtggtggggaagggcttatccttttgtggcggatctagcttctcctcgccttcaggatgaaagctcagggggaaaccgaggagtcagaaaagctgagtaagatgagttctctcctggaacggctccatgcaaaatttaaccaaaatagaccctggagtgaaaccattaagcttgtgcgtcaagtcatggagaagagggttgtgatgagttctggagggcatcaacatttggtcagctgtttggagacattgcagaaggctctcaaagtaacatctttaccagcaatgactgatcgtttggagtccatagcaagacagaatggactgggctctcatctcagtgccagtggcactgaatgttacatcacgtcagatatgttctatgtggaagtgcagttagatcctgcaggacagctttgtgatgtaaaagtggctcaccatggggagaatcctgtgagctgtccggagcttgtacagcagctaagggaaaaaaattttgatgaattttctaagcaccttaagggccttgttaatctgtataaccttccaggggacaacaaactgaagactaaaatgtacttggctctccaatccttagaacaagatctttctaaaatggcaattatgtactggaaagcaactaatgctggtcccttggataagattcttcatggaagtgttggctatctcacaccaaggagtgggggtcatttaatgaacctgaagtactatgtctctccttctgacctactggatgacaagactgcatctcccatcattttgcatgagaataatgtttctcgatctttgggcatgaatgcatcagtgacaattgaaggaacatctgctgtgtacaaactcccaattgcaccattaattatggggtcacatccagttgacaataaatggaccccttccttctcctcaatcaccagtgccaacagtgttgatcttcctgcctgtttcttcttgaaatttccccagccaatcccagtatctagagcatttgttcagaaactgcagaactgcacaggaattccattgtttgaaactcaaccaacttatgcacccctgtatgaactgatcactcagtttgagctatcaaaggaccctgaccccatacctttgaatcacaacatgagattttatgctgctcttcctggtcagcagcactgctatttcctcaacaaggatgctcctcttccagatggccgaagtctacagggaacccttgttagcaaaatcacctttcagcaccctggccgagttcctcttatcctaaatctgatcagacaccaagtggcctataacaccctcattggaagctgtgtcaaaagaactattctgaaagaagattctcctgggcttctccaatttgaagtgtgtcctctctcagagtctcgtttcagcgtatcttttcagcaccctgtgaatgactccctggtgtgtgtggtaatggatgtgcaggactcaacacatgtgagctgtaaactctacaaagggctgtcggatgcactgatctgcacagatgacttcattgccaaagttgttcaaagatgtatgtccatccctgtgacgatgagggctattcggaggaaagctgaaaccattcaagccgacaccccagcactgtccctcattgcagagacagttgaagacatggtgaaaaagaacctgcccccggctagcagcccagggtatggcatgaccacaggcaacaacccaatgagtggtaccactacaccaaccaacacctttccggggggtcccattaccaccttgtttaatatgagcatgagcatcaaagatcggcatgagtcggtgggccatggggaggacttcagcaaggtgtctcagaacccaattcttaccagtttgttgcaaatcacagggaacggggggtctaccattggctcgagtccgacccctcctcatcacacgccgccacctgtctcttcgatggccggcaacaccaagaaccacccgatgctcatgaaccttcttaaagataatcctgcccaggatttctcaaccctttatggaagcagccctttagaaaggcagaactcctcttccggctcaccccgcatggaaatatgctcggggagcaacaagaccaagaaaaagaagtcatcaagattaccacctgagaaaccaaagcaccagactgaagatgactttcagagggagctattttcaatggatgttgactcacagaaccctatctttgatgtcaacatgacagctgacacgctggatacgccacacatcactccagctccaagccagtgtagcactcccccaacaacttacccacaaccagtacctcacccccaacccagtattcaaaggatggtccgactatccagttcagacagcattggcccagatgtaactgacatcctttcagacattgcagaagaagcttctaaacttcccagcactagtgatgattgcccagccattggcacccctcttcgagattcttcaagctctgggcattctcagagtaccctgtttgactctgatgtctttcaaactaacaataatgaaaatccatacactgatccagctgatcttattgcagatgctgctggaagccccagtagtgactctcctaccaatcatttttttcatgatggagtagatttcaatcctgatttattgaacagccagagccaaagtggttttggagaagaatattttgatgaaagcagccaaagtggggataatgatgatttcaaaggatttgcatctcaggcactaaatactttgggggtgccaatgcttggaggtgataatggggagaccaagtttaagggcaataaccaagccgacacagttgatttcagtattatttcagtagccggcaaagctttagctcctgcagatcttatggagcatcacagtggtagtcagggtcctttactgaccactggggacttagggaaagaaaagactcaaaagagggtaaaggaaggcaatggcaccagtaatagtactctctcggggcccggattagacagcaaaccagggaagcgcagtcggaccccttctaatgatgggaaaagcaaagataagcctccaaagcggaagaaggcagacactgagggaaagtctccatctcatagttcttctaacagaccttttaccccacctaccagtacaggtggatctaaatcgccaggcagtgcaggaagatctcagactcccccaggtgttgccacaccacccattcccaaaatcactattcagattcctaagggaacagtgatggtgggcaagccttcctctcacagtcagtataccagcagtggttctgtgtcttcctcaggcagcaaaagccaccatagccattcttcctcctcttcctcatctgcttccacctcagggaagatgaaaagcagtaaatcagaaggttcatcaagttccaagttaagtagcagtatgtattctagccaggggtcttctggatctagccagtccaaaaattcatcccagtctggggggaagccaggctcctctcccataaccaagcatggactgagcagtggctctagcagcaccaagatgaaacctcaaggaaagccatcatcacttatgaatccttctttaagtaaaccaaacatatccccttctcattcaaggccacctggaggctctgacaagcttgcctctccaatgaagcctgttcctggaactcctccatcctctaaagccaagtcccctatcagttcaggttctggtggttctcatatgtctggaactagttcaagctctggcatgaagtcatcttcagggttaggatcctcaggctcgttgtcccagaaaactcccccatcatctaattcctgtacggcatcttcctcctccttttcctcaagtggctcttccatgtcatcctctcagaaccagcatgggagttctaaaggaaaatctcccagcagaaacaagaagccgtccttgacagctgtcatagataaactgaagcatggggttgtcaccagtggccctgggggtgaagacccactggacggccagatgggggtgagcacaaattcttccagccatcctatgtcctccaaacataacatgtcaggaggagagtttcagggcaagcgtgagaaaagtgataaagacaaatcaaaggtttccacctccgggagttcagtggattcttctaagaagacctcagagtcaaaaaatgtggggagcacaggtgtggcaaaaattatcatcagtaagcatgatggaggctcccctagcattaaagccaaagtgactttgcagaaacctggggaaagtagtggagaagggcttaggcctcaaatggcttcttctaaaaactatggctctccactcatcagtggttccactccaaagcatgagcgtggctctcccagccatagtaagtcaccagcatataccccccagaatctggacagtgaaagtgagtcaggctcctccatagcagagaaatcttatcagaatagtcccagctcagacgatggtatccgaccacttccagaatacagcacagagaaacataagaagcacaaaaaggaaaagaagaaagtaaaagacaaagatagggaccgagaccgggacaaagaccgagacaagaaaaaatctcatagcatcaagccagagagttggtccaaatcacccatctcttcagaccagtccttgtctatgacaagtaacacaatcttatctgcagacagaccctcaaggctcagcccagactttatgattggggaggaagatgatgatcttatggatgtggccctgattgggaattaggaaccttatttcctaaaagaaacagggccagaggaaaaaaaactattgataagtttataggcaaaccaccataaggggtgagtcagacaggtctgatttggttaagaatcctaaatggcatggctttgacatcaagctgggtgaattagaaaggcatatccagaccctattaaagaaaccacagggtttgattctggttaccaggaagtcttctttgttcctgtgccagaaagaaagttaaaatacttgcttaagaaagggaggggggtgggaggggtgtagggagagggaagggagggaaacagttttgtgggaaatattcatatatattttcttctccctttttccatttttaggccatgttttaaactcattttagtgcatgtatatgaagggctgggcagaaaatgaaaaagcaatacattccttgatgcatttgcatgaaggttgttcaactttgtttgaggtagttgtccgtttgagtcatgggcaaatgaaggactttggtcattttggacacttaagtaatgtttggtgtctgtttcttaggagtgactgggggagggaagattattttagctatttatttgtaatattttaaccctttatctgtttgtttttatacagtgtttcgttctaaatctatgaggtttagggttcaaaatgatggaaggccgaagagcaaggcttatatggtggtagggagcttatagcttgtgctaatactgtagcatcaagcccaagcaaattagtcagagcccgcctttagagttaaatataatagaaaaaccaaaatgatatttttattttaggagggtttaaatagggttcagagatcataggaatattaggagttacctctctgtggaggtat

SEQ ID NO: 96 - protein, 1581 aa, Homo sapiens
  FLJ20291 fis, clone HEP04788
MKAQGETEESEKLSKMSSLLERLHAKFNQNRPWSETIKLVRQVMEKRVVMSSGGHQHLVSCLETLQKALKVTSLPAMTDRLESIARQNGLGSHLSASGTECYITSDMFYVEVQLDPAGQLCDVKVAHHGENPVSCPELVQQLREKNFDEFSKHLKGLVNLYNLPGDNKLKTKMYLALQSLEQDLSKMAIMYWKATNAGPLDKILHGSVGYLTPRSGGHLMNLKYYVSPSDLLDDKTASPIILHENNVSRSLGMNASVTIEGTSAVYKLPIAPLIMGSHPVDNKWTPSFSSITSANSVDLPACFFLKFPQPIPVSRAFVQKLQNCTGIPLFETQPTYAPLYELITQFELSKDPDPIPLNHNMRFYAALPGQQHCYFLNKDAPLPDGRSLQGTLVSKITFQHPGRVPLILNLIRHQVAYNTLIGSCVKRTILKEDSPGLLQFEVCPLSESRFSVSFQHPVNDSLVCVVMDVQDSTHVSCKLYKGLSDALICTDDFIAKVVQRCMSIPVTMRAIRRKAETIQADTPALSLIAETVEDMVKKNLPPASSPGYGMTTGNNPMSGTTTPTNTFPGGPITTLFNMSMSIKDRHESVGHGEDFSKVSQNPILTSLLQITGNGGSTIGSSPTPPHHTPPPVSSMAGNTKNHPMLMNLLKDNPAQDFSTLYGSSPLERQNSSSGSPRMEICSGSNKTKKKKSSRLPPEKPKHQTEDDFQRELFSMDVDSQNPIFDVNMTADTLDTPHITPAPSQCSTPPTTYPQPVPHPQPSIQRMVRLSSSDSIGPDVTDILSDIAEEASKLPSTSDDCPAIGTPLRDSSSSGHSQSTLFDSDVFQTNNNENPYTDPADLIADAAGSPSSDSPTNHFFHDGVDFNPDLLNSQSQSGFGEEYFDESSQSGDNDDFKGFASQALNTLGVPMLGGDNGETKFKGNNQADTVDFSIISVAGKALAPADLMEHHSGSQGPLLTTGDLGKEKTQKRVKEGNGTSNSTLSGPGLDSKPGKRSRTPSNDGKSKDKPPKRKKADTEGKSPSHSSSNRPFTPPTSTGGSKSPGSAGRSQTPPGVATPPIPKITIQIPKGTVMVGKPSSHSQYTSSGSVSSSGSKSHHSHSSSSSSSASTSGKMKSSKSEGSSSSKLSSSMYSSQGSSGSSQSKNSSQSGGKPGSSPITKHGLSSGSSSTKMKPQGKPSSLMNPSLSKPNISPSHSRPPGGSDKLASPMKPVPGTPPSSKAKSPISSGSGGSHMSGTSSSSGMKSSSGLGSSGSLSQKTPPSSNSCTASSSSFSSSGSSMSSSQNQHGSSKGKSPSRNKKPSLTAVIDKLKHGVVTSGPGGEDPLDGQMGVSTNSSSHPMSSKHNMSGGEFQGKREKSDKDKSKVSTSGSSVDSSKKTSESKNVGSTGVAKIIISKHDGGSPSIKAKVTLQKPGESSGEGLRPQMASSKNYGSPLISGSTPKHERGSPSHSKSPAYTPQNLDSESESGSSIAEKSYQNSPSSDDGIRPLPEYSTEKHKKHKKEKKKVKDKDRDRDRDKDRDKKKSHSIKPESWSKSPISSDQSLSMTSNTILSADRPSRLSPDFMIGEEDDDLMDVALIGN

SEQ ID NO: 97 - DNA, 2073 bp, Homo sapiens
  mediator complex subunit 1 (MED1), thyroid hormone receptor interactor 2 (TRIP2), peroxisome proliferator-activated receptor (PPAR) binding protein (PPARBP)
ggcgctactgaggccgcggagccggactgcggttggggcgggaagagccggggccgtggctgacatggagcagccctgctgctgaggccgcgccctccccgccctgaggtgggggcccaccaggatgagcaagctgcccagggagctgacccgagacttggagcgcagcctgcctgccgtggcctccctgggctcctcactgtcccacagccagagcctctcctcgcacctccttccgccgcctgagaagcgaagggccatctctgatgtccgccgcaccttctgtctcttcgtcaccttcgacctgctcttcatctccctgctctggatcatcgaactgaataccaacacaggcatccgtaagaacttggagcaggagatcatccagtacaactttaaaacttccttcttcgacatctttgtcctggccttcttccgcttctctggactgctcctaggctatgccgtgctgcggctccggcactggtgggtgattgcggtcacgacgctggtgtccagtgcattcctcattgtcaaggtcatcctctctgagctgctcagcaaaggggcatttggctacctgctccccatcgtctcttttgtcctcgcctggttggagacctggttccttgacttcaaagtcctaccccaggaagctgaagaggagcgatggtatcttgccgcccaggttgctgttgcccgtggacccctgctgttctccggtgctctgtccgagggacagttctattcacccccagaatcctttgcagcgtctgacaatgaatcagatgaagaagttgctgggaagaaaagtttctctgctcaggagcgggagtacatccgccaggggaaggaggccacggcagtggtggaccagatcttggcccaggaagagaactggaagtttgagaagaataatgaatatggggacaccgtgtacaccattgaagttccctttcacggcaagacgtttatcctgaagaccttcctgccctgtcctgcggagctcgtgtaccaggaggtgatcctgcagcccgagaggatggtgctgtggaacaagacagtgactgcctgccagatcctgcagcgagtggaagacaacaccctcatctcctatgacgtgtctgcaggggctgcgggcggcgtggtctccccaagggacttcgtgaatgtccggcgcattgagcggcgcagggaccgatacttgtcatcagggatcgccacctcacacagtgccaagcccccgacgcacaaatatgtccggggagagaatggccctgggggcttcatcgtgctcaagtcggccagtaacccccgtgtttgcacctttgtctggattcttaatacagatctcaagggccgcctgccccggtacctcatccaccagagcctcgcggccaccatgtttgaatttgcctttcacctgcgacagcgcatcagcgagctgggggcccgggcgtgactgtgccccctcccaccctgcgggccagggtcctgtcgccaccacttccagagccagaaagggtgccagttgggctcgcactgcccacatgggacctggccccaggctgtcaccctccaccgagccacgcagtgcctggagttgactgactgagcaggctgtggggtggagcactggactccggggccccactggctggaggaagtggggtctggcctgttgatgtttacatggcgccctgcctcctggaggaccagattgctctgccccaccttgccagggcagggtctgggctgggcacctgacttggctggggaggaccagggccctgggcagggcagggcagcctgtcacccgtgtgaagatgaaggggctcttcatctgcctgcgctctcgtcggtttttttaggattattgaaagagtctgggacccttgttggggagtgggtggcaggtgggggtgggctgctggccatgaatctctgcctctcccaggctgtccccctcctcccagggcctcctgggggacctttgtattaagccaattaaaaacatgaatttaaaaaaaaaaaaaaaaaaaaaaaaaaaaaaaaaaaaaaaaaaaaaaaaaa

SEQ ID NO: 98 - protein, 445 aa, Homo sapiens
  mediator complex subunit 1 (MED1), thyroid hormone receptor interactor 2 (TRIP2), peroxisome proliferator-activated receptor (PPAR) binding protein (PPARBP)
MSKLPRELTRDLERSLPAVASLGSSLSHSQSLSSHLLPPPEKRRAISDVRRTFCLFVTFDLLFISLLWIIELNTNTGIRKNLEQEIIQYNFKTSFFDIFVLAFFRFSGLLLGYAVLRLRHWWVIAVTTLVSSAFLIVKVILSELLSKGAFGYLLPIVSFVLAWLETWFLDFKVLPQEAEEERWYLAAQVAVARGPLLFSGALSEGQFYSPPESFAASDNESDEEVAGKKSFSAQEREYIRQGKEATAVVDQILAQEENWKFEKNNEYGDTVYTIEVPFHGKTFILKTFLPCPAELVYQEVILQPERMVLWNKTVTACQILQRVEDNTLISYDVSAGAAGGVVSPRDFVNVRRIERRRDRYLSSGIATSHSAKPPTHKYVRGENGPGGFIVLKSASNPRVCTFVWILNTDLKGRLPRYLIHQSLAATMFEFAFHLRQRISELGARA

SEQ ID NO: 99 - DNA, 963 bp, Homo sapiens
  steroidogenic acute regulatory protein related (MLN64), StAR-related lipid transfer (START) domain containing 3 (STARD3)
aatgaggagtgatcatggctacctcagagctgagctgcgaggtgtcggaggagaactgtgagcgccgggaggccttctgggcagaatggaaggatctgacactgtccacacggcccgaggagggctgctccctgcatgaggaggacacccagagacatgagacctaccaccagcaggggcagtgccaggtgctggtgcagcgctcgccctggctgatgatgcggatgggcatcctcggccgtgggctgcaggagtaccagctgccctaccagcgggtactgccgctgcccatcttcacccctgccaagatgggcgccaccaaggaggagcgtgaggacacccccatccagcttcaggagctgctggcgctggagacagccctgggtggccagtgtgtggaccgccaggaggtggctgagatcacaaagcagctgccccctgtggtgcctgtcagcaagcccggtgcccttcgtcgctccctgtcccgctccatgtcccaggaagcacagagaggctgagagggactgtgacttgggctccgctgtgcccgccctgggctgggcccttcctggctaggactgtggaggggagctgctggccatggctgctttgtagtttgcccagagttgggggctaggggaggggggagccagaggccaggatgcctgagccccctgagttcccaaagggagggtggcagagacagtgggcactaagggtggagagttgggggccagcacagctgaggaccctcagccccaggagaagggacaaaaggtactggtgagggcaagaggtgcctgggaggagtggccctgatccaggaaaatgtgaggggaatctggaacgctctaggcagaagaagctgggagggagggggaggtgaaaagggcagaggcaaggatggtggggcccccagcaccctctgttagtgccgcaataaatgctcaatcatgtgccaga

SEQ ID NO: 100 - protein, 167 aa, Homo sapiens
  steroidogenic acute regulatory protein related (MLN64), StAR-related lipid transfer (START) domain containing 3 (STARD3)
MATSELSCEVSEENCERREAFWAEWKDLTLSTRPEEGCSLHEEDTQRHETYHQQGQCQVLVQRSPWLMMRMGILGRGLQEYQLPYQRVLPLPIFTPAKMGATKEEREDTPIQLQELLALETALGGQCVDRQEVAEITKQLPPVVPVSKPGALRRSLSRSMSQEAQRG

SEQ ID NO: 101 - DNA, 2708 bp, Homo sapiens
  titin-cap (telethonin) (TCAP), 19 kDa sarcomeric protein
atactcctaagctcctcccccggcggcgagccagggagaaaggatggccggcctggcggcgcggttggtcctgctagctggggcagcggcgctggcgagcggctcccagggcgaccgtgagccggtgtaccgcgactgcgtactgcagtgcgaagagcagaactgctctgggggcgctctgaatcacttccgctcccgccagccaatctacatgagtctagcaggctggacctgtcgggacgactgtaagtatgagtgtatgtgggtcaccgttgggctctacctccaggaaggtcacaaagtgcctcagttccatggcaagtggcccttctcccggttcctgttctttcaagagccggcatcggccgtggcctcgtttctcaatggcctggccagcctggtgatgctctgccgctaccgcaccttcgtgccagcctcctcccccatgtaccacacctgtgtggccttcgcctgggtgtccctcaatgcatggttctggtccacagttttccacaccagggacactgacctcacagagaaaatggactacttctgtgcctccactgtcatcctacactcaatctacctgtgctgcgtcaggaccgtggggctgcagcacccagctgtggtcagtgccttccgggctctcctgctgctcatgctgaccgtgcacgtctcctacctgagcctcatccgcttcgactatggctacaacctggtggccaacgtggctattggcctggtcaacgtggtgtggtggctggcctggtgcctgtggaaccagcggcggctgcctcacgtgcgcaagtgcgtggtggtggtcttgctgctgcaggggctgtccctgctcgagctgcttgacttcccaccgctcttctgggtcctggatgcccatgccatctggcacatcagcaccatccctgtccacgtcctctttttcagctttctggaagatgacagcctgtacctgctgaaggaatcagaggacaagttcaagctggactgaagaccttggagcgagtctgccccagtggggatcctgcccccgccctgctggcctcccttctcccctcaacccttgagatgattttctcttttcaacttcttgaacttggacatgaaggatgtgggcccagaatcatgtggccagcccaccccctgttggccctcaccagccttggagtctgttctagggaaggcctcccagcatctgggactcgagagtgggcagcccctctacctcctggagctgaactggggtggaactgagtgtgctcttagctctaccgggaggacagctgcctgtttcctccccatcagcctcctccccacatccccagctgcctggctgggtcctgaagccctctgtctacctgggagaccagggaccacaggccttagggatacagggggtccccttctgttaccaccccccaccctcctccaggacaccactaggtggtgctggatgcttgttctttggccagccaaggttcacggcgattctccccatgggatcttgagggaccaagctgctgggattgggaaggagtttcaccctgaccattgccctagccaggttcccaggaggcctcaccatactccctttcagggccagggctccagcaagcccagggcaaggatcctgtgctgctgtctggttgagagcctgccaccgtgtgtcgggagtgtgggccaggctgagtgcataggtgacagggccgtgagcatgggcctgggtgtgtgtgagctcaggcctaggtgcgcagtgtggagacgggtgttgtcggggaagaggtgtggcttcaaagtgtgtgtgtgcagggggtgggtgtgttagcgtgggttaggggaacgtgtgtgcgcgtgctggtgggcatgtgagatgagtgactgccggtgaatgtgtccacagttgagaggttggagcaggatgagggaatcctgtcaccatcaataatcacttgtggagcgccagctctgcccaaggcgccacctgggcggacagccaggagctctccatggccaggctgcctgtgtgcatgttccctgtctggtgcccctttgcccgcctcctgcaaacctcacagggtccccacacaacagtgccctccagaagcagcccctcggaggcagaggaaggaaaatggggatggctggggctctctccatcctccttttctccttgccttcgcatggctggccttcccctccaaaacctccattcccctgctgccagcccctttgccatagcctgattttggggaggaggaaggggcgatttgagggagaaggggagaaagcttatggctgggtctggtttcttcccttcccagagggtcttactgttccagggtggccccagggcaggcaggggccacactatgcctgcgccctggtaaaggtgacccctgccatttaccagcagccctggcatgttcctgccccacaggaatagaatggagggagctccagaaactttccatcccaaaggcagtctccgtggttgaagcagactggatttttgctctgcccctgaccccttgtccctctttgagggaggggagctatgctaggactccaacctcagggactcgggtggcctgcgctagcttcttttgatactgaaaacttttaaggtgggagggtggcaagggatgtgcttaataaatcaattccaagcctcaaaaaaaaaaaaaaaaaaaaaa

SEQ ID NO: 102 - protein, 320 aa, Homo sapiens
  titin-cap (telethonin) (TCAP), 19 kDa sarcomeric protein
MAGLAARLVLLAGAAALASGSQGDREPVYRDCVLQCEEQNCSGGALNHFRSRQPIYMSLAGWTCRDDCKYECMWVTVGLYLQEGHKVPQFHGKWPFSRFLFFQEPASAVASFLNGLASLVMLCRYRTFVPASSPMYHTCVAFAWVSLNAWFWSTVFHTRDTDLTEKMDYFCASTVILHSIYLCCVRTVGLQHPAVVSAFRALLLLMLTVHVSYLSLIRFDYGYNLVANVAIGLVNVVWWLAWCLWNQRRLPHVRKCVVVVLLLQGLSLLELLDFPPLFWVLDAHAIWHISTIPVHVLFFSFLEDDSLYLLKESEDKFKLD

SEQ ID NO: 103 - DNA, 4624 bp, Homo sapiens
  per1-like domain containing 1 (PERLD1), CAB2
ggaggaggtggaggaggagggctgcttgaggaagtataagaatgaagttgtgaagctgagattcccctccattgggaccggagaaaccaggggagccccccgggcagccgcgcgccccttcccacggggccctttactgcgccgcgcgcccggcccccacccctcgcagcaccccgcgccccgcgccctcccagccgggtccagccggagccatggggccggagccgcagtgagcaccatggagctggcggccttgtgccgctgggggctcctcctcgccctcttgccccccggagccgcgagcacccaagtgtgcaccggcacagacatgaagctgcggctccctgccagtcccgagacccacctggacatgctccgccacctctaccagggctgccaggtggtgcagggaaacctggaactcacctacctgcccaccaatgccagcctgtccttcctgcaggatatccaggaggtgcagggctacgtgctcatcgctcacaaccaagtgaggcaggtcccactgcagaggctgcggattgtgcgaggcacccagctctttgaggacaactatgccctggccgtgctagacaatggagacccgctgaacaataccacccctgtcacaggggcctccccaggaggcctgcgggagctgcagcttcgaagcctcacagagatcttgaaaggaggggtcttgatccagcggaacccccagctctgctaccaggacacgattttgtggaaggacatcttccacaagaacaaccagctggctctcacactgatagacaccaaccgctctcgggcctgccacccctgttctccgatgtgtaagggctcccgctgctggggagagagttctgaggattgtcagagcctgacgcgcactgtctgtgccggtggctgtgcccgctgcaaggggccactgcccactgactgctgccatgagcagtgtgctgccggctgcacgggccccaagcactctgactgcctggcctgcctccacttcaaccacagtggcatctgtgagctgcactgcccagccctggtcacctacaacacagacacgtttgagtccatgcccaatcccgagggccggtatacattcggcgccagctgtgtgactgcctgtccctacaactacctttctacggacgtgggatcctgcaccctcgtctgccccctgcacaaccaagaggtgacagcagaggatggaacacagcggtgtgagaagtgcagcaagccctgtgcccgagtgtgctatggtctgggcatggagcacttgcgagaggtgagggcagttaccagtgccaatatccaggagtttgctggctgcaagaagatctttgggagcctggcatttctgccggagagctttgatggggacccagcctccaacactgccccgctccagccagagcagctccaagtgtttgagactctggaagagatcacaggttacctatacatctcagcatggccggacagcctgcctgacctcagcgtcttccagaacctgcaagtaatccggggacgaattctgcacaatggcgcctactcgctgaccctgcaagggctgggcatcagctggctggggctgcgctcactgagggaactgggcagtggactggccctcatccaccataacacccacctctgcttcgtgcacacggtgccctgggaccagctctttcggaacccgcaccaagctctgctccacactgccaaccggccagaggacgagtgtgtgggcgagggcctggcctgccaccagctgtgcgcccgagggcactgctggggtccagggcccacccagtgtgtcaactgcagccagttccttcggggccaggagtgcgtggaggaatgccgagtactgcaggggctccccagggagtatgtgaatgccaggcactgtttgccgtgccaccctgagtgtcagccccagaatggctcagtgacctgttttggaccggaggctgaccagtgtgtggcctgtgcccactataaggaccctcccttctgcgtggcccgctgccccagcggtgtgaaacctgacctctcctacatgcccatctggaagtttccagatgaggagggcgcatgccagccttgccccatcaactgcacccactcctgtgtggacctggatgacaagggctgccccgccgagcagagagccagccctctgacgtccatcatctctgcggtggttggcattctgctggtcgtggtcttgggggtggtctttgggatcctcatcaagcgacggcagcagaagatccggaagtacacgatgcggagactgctgcaggaaacggagctggtggagccgctgacacctagcggagcgatgcccaaccaggcgcagatgcggatcctgaaagagacggagctgaggaaggtgaaggtgcttggatctggcgcttttggcacagtctacaagggcatctggatccctgatggggagaatgtgaaaattccagtggccatcaaagtgttgagggaaaacacatcccccaaagccaacaaagaaatcttagacgaagcatacgtgatggctggtgtgggctccccatatgtctcccgccttctgggcatctgcctgacatccacggtgcagctggtgacacagcttatgccctatggctgcctcttagaccatgtccgggaaaaccgcggacgcctgggctcccaggacctgctgaactggtgtatgcagattgccaaggggatgagctacctggaggatgtgcggctcgtacacagggacttggccgctcggaacgtgctggtcaagagtcccaaccatgtcaaaattacagacttcgggctggctcggctgctggacattgacgagacagagtaccatgcagatgggggcaaggtgcccatcaagtggatggcgctggagtccattctccgccggcggttcacccaccagagtgatgtgtggagttatggtgtgactgtgtgggagctgatgacttttggggccaaaccttacgatgggatcccagcccgggagatccctgacctgctggaaaagggggagcggctgccccagccccccatctgcaccattgatgtctacatgatcatggtcaaatgttggatgattgactctgaatgtcggccaagattccgggagttggtgtctgaattctcccgcatggccagggacccccagcgctttgtggtcatccagaatgaggacttgggcccagccagtcccttggacagcaccttctaccgctcactgctggaggacgatgacatgggggacctggtggatgctgaggagtatctggtaccccagcagggcttcttctgtccagaccctgccccgggcgctgggggcatggtccaccacaggcaccgcagctcatctaccaggagtggcggtggggacctgacactagggctggagccctctgaagaggaggcccccaggtctccactggcaccctccgaaggggctggctccgatgtatttgatggtgacctgggaatgggggcagccaaggggctgcaaagcctccccacacatgaccccagccctctacagcggtacagtgaggaccccacagtacccctgccctctgagactgatggctacgttgcccccctgacctgcagcccccagcctgaatatgtgaaccagccagatgttcggccccagcccccttcgccccgagagggccctctgcctgctgcccgacctgctggtgccactctggaaaggcccaagactctctccccagggaagaatggggtcgtcaaagacgtttttgcctttgggggtgccgtggagaaccccgagtacttgacaccccagggaggagctgcccctcagccccaccctcctcctgccttcagcccagccttcgacaacctctattactgggaccaggacccaccagagcggggggctccacccagcaccttcaaagggacacctacggcagagaacccagagtacctgggtctggacgtgccagtgtgaaccagaaggccaagtccgcagaagccctgatgtgtcctcagggagcagggaaggcctgacttctgctggcatcaagaggtgggagggccctccgaccacttccaggggaacctgccatgccaggaacctgtcctaaggaaccttccttcctgcttgagttcccagatggctggaaggggtccagcctcgttggaagaggaacagcactggggagtctttgtggattctgaggccctgcccaatgagactctagggtccagtggatgccacagcccagcttggccctttccttccagatcctgggtactgaaagccttagggaagctggcctgagaggggaagcggccctaagggagtgtctaagaacaaaagcgacccattcagagactgtccctgaaacctagtactgccccccatgaggaaggaacagcaatggtgtcagtatccaggctttgtacagagtgcttttctgtttagtttttactttttttgttttgtttttttaaagatgaaataaagacccagggggagaatgggtgttgtatggggaggcaagtgtggggggtccttctccacacccactttgtccatttgcaaatatattttggaaaacagcta

SEQ ID NO: 104 - protein, 1255 aa, Homo sapiens [sequence omitted]

SEQ ID NO: 105 - DNA, 4816 bp, Homo sapiens
  growth factor receptor-bound protein 7 (GRB7), transcript variant 2
gttcccggatttttgtgggcgcctgccccgcccctcgtccccctgctgtgtccatatatcgaggcgatagggttaagggaaggcggacgcctgatgggttaatgagcaaactgaagtgttttccatgatcttttttgagtcgcaattgaagtaccacctcccgagggtgattgcttccccatgcggggtagaacctttgctgtcctgttcaccactctacctccagcacagaatttggcttatgcctactcaatgtgaagatgatgaggatgaaaacctttgtgatgatccacttccacttaatgaatggtggcaaagcaaagctatattcaagaccacatgcaaagctactccctgagcaaagagtcacagataaaacgggggcaccagtagaatggccaggacaaacgcagtgcagcacagagactcagaccctggcagccatgcctgcgcaggcagtgatgagagtgacatgtactgttgtggacatgcacaaaagtgagtgtgcaccggcacagacatgaagctgcggctccctgccagtcccgagacccacctggacatgctccgccacctctaccagggctgccaggtggtgcagggaaacctggaactcacctacctgcccaccaatgccagcctgtccttcctgcaggatatccaggaggtgcagggctacgtgctcatcgctcacaaccaagtgaggcaggtcccactgcagaggctgcggattgtgcgaggcacccagctctttgaggacaactatgccctggccgtgctagacaatggagacccgctgaacaataccacccctgtcacaggggcctccccaggaggcctgcgggagctgcagcttcgaagcctcacagagatcttgaaaggaggggtcttgatccagcggaacccccagctctgctaccaggacacgattttgtggaaggacatcttccacaagaacaaccagctggctctcacactgatagacaccaaccgctctcgggcctgccacccctgttctccgatgtgtaagggctcccgctgctggggagagagttctgaggattgtcagagcctgacgcgcactgtctgtgccggtggctgtgcccgctgcaaggggccactgcccactgactgctgccatgagcagtgtgctgccggctgcacgggccccaagcactctgactgcctggcctgcctccacttcaaccacagtggcatctgtgagctgcactgcccagccctggtcacctacaacacagacacgtttgagtccatgcccaatcccgagggccggtatacattcggcgccagctgtgtgactgcctgtccctacaactacctttctacggacgtgggatcctgcaccctcgtctgccccctgcacaaccaagaggtgacagcagaggatggaacacagcggtgtgagaagtgcagcaagccctgtgcccgagtgtgctatggtctgggcatggagcacttgcgagaggtgagggcagttaccagtgccaatatccaggagtttgctggctgcaagaagatctttgggagcctggcatttctgccggagagctttgatggggacccagcctccaacactgccccgctccagccagagcagctccaagtgtttgagactctggaagagatcacaggttacctatacatctcagcatggccggacagcctgcctgacctcagcgtcttccagaacctgcaagtaatccggggacgaattctgcacaatggcgcctactcgctgaccctgcaagggctgggcatcagctggctggggctgcgctcactgagggaactgggcagtggactggccctcatccaccataacacccacctctgcttcgtgcacacggtgccctgggaccagctctttcggaacccgcaccaagctctgctccacactgccaaccggccagaggacgagtgtgtgggcgagggcctggcctgccaccagctgtgcgcccgagggcactgctggggtccagggcccacccagtgtgtcaactgcagccagttccttcggggccaggagtgcgtggaggaatgccgagtactgcaggggctccccagggagtatgtgaatgccaggcactgtttgccgtgccaccctgagtgtcagccccagaatggctcagtgacctgttttggaccggaggctgaccagtgtgtggcctgtgcccactataaggaccctcccttctgcgtggcccgctgccccagcggtgtgaaacctgacctctcctacatgcccatctggaagtttccagatgaggagggcgcatgccagccttgccccatcaactgcacccactcctgtgtggacctggatgacaagggctgccccgccgagcagagagccagccctctgacgtccatcatctctgcggtggttggcattctgctggtcgtggtcttgggggtggtctttgggatcctcatcaagcgacggcagcagaagatccggaagtacacgatgcggagactgctgcaggaaacggagctggtggagccgctgacacctagcggagcgatgcccaaccaggcgcagatgcggatcctgaaagagacggagctgaggaaggtgaaggtgcttggatctggcgcttttggcacagtctacaagggcatctggatccctgatggggagaatgtgaaaattccagtggccatcaaagtgttgagggaaaacacatcccccaaagccaacaaagaaatcttagacgaagcatacgtgatggctggtgtgggctccccatatgtctcccgccttctgggcatctgcctgacatccacggtgcagctggtgacacagcttatgccctatggctgcctcttagaccatgtccgggaaaaccgcggacgcctgggctcccaggacctgctgaactggtgtatgcagattgccaaggggatgagctacctggaggatgtgcggctcgtacacagggacttggccgctcggaacgtgctggtcaagagtcccaaccatgtcaaaattacagacttcgggctggctcggctgctggacattgacgagacagagtaccatgcagatgggggcaaggtgcccatcaagtggatggcgctggagtccattctccgccggcggttcacccaccagagtgatgtgtggagttatggtgtgactgtgtgggagctgatgacttttggggccaaaccttacgatgggatcccagcccgggagatccctgacctgctggaaaagggggagcggctgccccagccccccatctgcaccattgatgtctacatgatcatggtcaaatgttggatgattgactctgaatgtcggccaagattccgggagttggtgtctgaattctcccgcatggccagggacccccagcgctttgtggtcatccagaatgaggacttgggcccagccagtcccttggacagcaccttctaccgctcactgctggaggacgatgacatgggggacctggtggatgctgaggagtatctggtaccccagcagggcttcttctgtccagaccctgccccgggcgctgggggcatggtccaccacaggcaccgcagctcatctaccaggagtggcggtggggacctgacactagggctggagccctctgaagaggaggcccccaggtctccactggcaccctccgaaggggctggctccgatgtatttgatggtgacctgggaatgggggcagccaaggggctgcaaagcctccccacacatgaccccagccctctacagcggtacagtgaggaccccacagtacccctgccctctgagactgatggctacgttgcccccctgacctgcagcccccagcctgaatatgtgaaccagccagatgttcggccccagcccccttcgccccgagagggccctctgcctgctgcccgacctgctggtgccactctggaaaggcccaagactctctccccagggaagaatggggtcgtcaaagacgtttttgcctttgggggtgccgtggagaaccccgagtacttgacaccccagggaggagctgcccctcagccccaccctcctcctgccttcagcccagccttcgacaacctctattactgggaccaggacccaccagagcggggggctccacccagcaccttcaaagggacacctacggcagagaacccagagtacctgggtctggacgtgccagtgtgaaccagaaggccaagtccgcagaagccctgatgtgtcctcagggagcagggaaggcctgacttctgctggcatcaagaggtgggagggccctccgaccacttccaggggaacctgccatgccaggaacctgtcctaaggaaccttccttcctgcttgagttcccagatggctggaaggggtccagcctcgttggaagaggaacagcactggggagtctttgtggattctgaggccctgcccaatgagactctagggtccagtggatgccacagcccagcttggccctttccttccagatcctgggtactgaaagccttagggaagctggcctgagaggggaagcggccctaagggagtgtctaagaacaaaagcgacccattcagagactgtccctgaaacctagtactgccccccatgaggaaggaacagcaatggtgtcagtatccaggctttgtacagagtgcttttctgtttagtttttactttttttgttttgtttttttaaagatgaaataaagacccagggggagaatgggtgttgtatggggaggcaagtgtggggggtccttctccacacccactttgtccatttgcaaatatattttggaaaacagcta

SEQ ID NO: 106 - protein, 1225 aa, Homo sapiens
  growth factor receptor-bound protein 7 (GRB7)
MKLRLPASPETHLDMLRHLYQGCQVVQGNLELTYLPTNASLSFLQDIQEVQGYVLIAHNQVRQVPLQRLRIVRGTQLFEDNYALAVLDNGDPLNNTTPVTGASPGGLRELQLRSLTEILKGGVLIQRNPQLCYQDTILWKDIFHKNNQLALTLIDTNRSRACHPCSPMCKGSRCWGESSEDCQSLTRTVCAGGCARCKGPLPTDCCHEQCAAGCTGPKHSDCLACLHFNHSGICELHCPALVTYNTDTFESMPNPEGRYTFGASCVTACPYNYLSTDVGSCTLVCPLHNQEVTAEDGTQRCEKCSKPCARVCYGLGMEHLREVRAVTSANIQEFAGCKKIFGSLAFLPESFDGDPASNTAPLQPEQLQVFETLEEITGYLYISAWPDSLPDLSVFQNLQVIRGRILHNGAYSLTLQGLGISWLGLRSLRELGSGLALIHHNTHLCFVHTVPWDQLFRNPHQALLHTANRPEDECVGEGLACHQLCARGHCWGPGPTQCVNCSQFLRGQECVEECRVLQGLPREYVNARHCLPCHPECQPQNGSVTCFGPEADQCVACAHYKDPPFCVARCPSGVKPDLSYMPIWKFPDEEGACQPCPINCTHSCVDLDDKGCPAEQRASPLTSIISAVVGILLVVVLGVVFGILIKRRQQKIRKYTMRRLLQETELVEPLTPSGAMPNQAQMRILKETELRKVKVLGSGAFGTVYKGIWIPDGENVKIPVAIKVLRENTSPKANKEILDEAYVMAGVGSPYVSRLLGICLTSTVQLVTQLMPYGCLLDHVRENRGRLGSQDLLNWCMQIAKGMSYLEDVRLVHRDLAARNVLVKSPNHVKITDFGLARLLDIDETEYHADGGKVPIKWMALESILRRRFTHQSDVWSYGVTVWELMTFGAKPYDGIPAREIPDLLEKGERLPQPPICTIDVYMIMVKCWMIDSECRPRFRELVSEFSRMARDPQRFVVIQNEDLGPASPLDSTFYRSLLEDDDMGDLVDAEEYLVPQQGFFCPDPAPGAGGMVHHRHRSSSTRSGGGDLTLGLEPSEEEAPRSPLAPSEGAGSDVFDGDLGMGAAKGLQSLPTHDPSPLQRYSEDPTVPLPSETDGYVAPLTCSPQPEYVNQPDVRPQPPSPREGPLPAARPAGATLERPKTLSPGKNGVVKDVFAFGGAVENPEYLTPQGGAAPQPHPPPAFSPAFDNLYYWDQDPPERGAPPSTFKGTPTAENPEYLGLDVPV

SEQ ID NO: 107 - DNA, 2116 bp, Homo sapiens
  gasdermin-like (GSDML), gasdermin B (GSDMB), transcript variant 1
cgtctccctccctgaagacgtggtcccagccgggtgtcctgacgctcggggttcaggacaagggcacacaactggttccgttaagcccctctcttgctcagacgccatggagctggatctgtctccacctcatcttagcagctctccggaagacctttgcccagcccctgggacccctcctgggactccccggccccctgatacccctctgcctgaggaggtaaagaggtcccagcctctcctcatcccaaccaccggcaggaaacttcgagaggaggagaggcgtgccacctccctcccctctatccccaaccccttccctgagctctgcagtcctccctcacagagcccaattctcgggggcccctccagtgcaagggggctgctcccccgcgatgccagccgcccccatgtagtaaaggtgtacagtgaggatggggcctgcaggtctgtggaggtggcagcaggtgccacagctcgccacgtgtgtgaaatgctggtgcagcgagctcacgccttgagcgacgagacctgggggctggtggagtgccacccccacctagcactggagcggggtttggaggaccacgagtccgtggtggaagtgcaggctgcctggcccgtgggcggagatagccgcttcgtcttccggaaaaacttcgccaagtacgaactgttcaagagctccccacactccctgttcccagaaaaaatggtctccagctgtctcgatgcacacactggtatatcccatgaagacctcatccagaacttcctgaatgctggcagctttcctgagatccagggctttctgcagctgcggggttcaggacggaagctttggaaacgctttttctgcttcttgcgccgatctggcctctattactccaccaagggcacctctaaggatccgaggcacctgcagtacgtggcagatgtgaacgagtccaacgtgtacgtggtgacgcagggccgcaagctctacgggatgcccactgacttcggtttctgtgtcaagcccaacaagcttcgaaatggccacaaggggcttcggatcttctgcagtgaagatgagcagagccgcacctgctggctggctgccttccgcctcttcaagtacggggtgcagctgtacaagaattaccagcaggcacagtctcgccatctgcatccatcttgtttgggctccccacccttgagaagtgcctcagataataccctggtggccatggacttctctggccatgctgggcgtgtcattgagaacccccgggaggctctgagtgtggccctggaggaggcccaggcctggaggaagaagacaaaccaccgcctcagcctgcccatgccagcctccggcacgagcctcagtgcagccatccaccgcacccaactctggttccacgggcgcatttcccgtgaggagagccagcggcttattggacagcagggcttggtagacggcctgttcctggtccgggagagtcagcggaacccccagggctttgtcctctctttgtgccacctgcagaaagtgaagcattatctcatcctgccgagcgaggaggagggccgcctgtacttcagcatggatgatggccagacccgcttcactgacctgctgcagctcgtggagttccaccagctgaaccgcggcatcctgccgtgcttgctgcgccattgctgcacgcgggtggccctctgaccaggccgtggactggctcatgcctcagcccgccttcaggctgcccgccgcccctccacccatccagtggactctggggcgcggccacaggggacgggatgaggagcgggagggttccgccactccagttttctcctctgcttctttgcctccctcagatagaaaacagcccccactccagtccactcctgacccctctcctcaagggaaggccttgggtggccccctctccttctcctagctctggaggtgctgctctagggcagggaattatgggagaagtgggggcagcccaggcggtttcacgccccacactttgtacagaccgagaggccagttgatctgctctgttttatactagtgacaataaagattattttttgatacaaaaaaaaaaaaaaaaaaaaaaaa

SEQ ID NO: 108 - protein, 532 aa, Homo sapiens
  gasdermin-like (GSDML), gasdermin B (GSDMB), isoform 1
MELDLSPPHLSSSPEDLCPAPGTPPGTPRPPDTPLPEEVKRSQPLLIPTTGRKLREEERRATSLPSIPNPFPELCSPPSQSPILGGPSSARGLLPRDASRPHVVKVYSEDGACRSVEVAAGATARHVCEMLVQRAHALSDETWGLVECHPHLALERGLEDHESVVEVQAAWPVGGDSRFVFRKNFAKYELFKSSPHSLFPEKMVSSCLDAHTGISHEDLIQNFLNAGSFPEIQGFLQLRGSGRKLWKRFFCFLRRSGLYYSTKGTSKDPRHLQYVADVNESNVYVVTQGRKLYGMPTDFGFCVKPNKLRNGHKGLRIFCSEDEQSRTCWLAAFRLFKYGVQLYKNYQQAQSRHLHPSCLGSPPLRSASDNTLVAMDFSGHAGRVIENPREALSVALEEAQAWRKKTNHRLSLPMPASGTSLSAAIHRTQLWFHGRISREESQRLIGQQGLVDGLFLVRESQRNPQGFVLSLCHLQKVKHYLILPSEEEGRLYFSMDDGQTRFTDLLQLVEFHQLNRGILPCLLRHCCTRVAL

SEQ ID NO: 109 - DNA, 1578 bp, Homo sapiens
  gasdermin-like (GSDML), gasdermin B (GSDMB), transcript variant 2, PRO2521
acaactttcagtttcattattttagcttcctgagattcagaggccaggaactgtgcagagatctgtggggattctcacaacttccatttctggtgaacagctgaggtcagagaggagttggtccaggcgcaatgttcagcgtatttgaggaaatcacaagaattgtagttaaggagatggatgctggaggggatatgattgccgttagaagccttgttgatgctgatagattccgctgcttccatctggtgggggagaagagaactttctttggatgccggcactacacaacaggcctcaccctgatggacattctggacacagatggggacaagtggttagatgaactggattctgggctccaaggtcaaaaggctgagtttcaaattctggataatgtagactcaacgggagagttgatagtgagattacccaaagaaataacaatttcaggcagtttccagggcttccaccatcagaaaatcaagatatcggagaaccggatatcccagcagtatctggctacccttgaaaacaggaagctgaagagggaactacccttttcattccgatcaattaatacgagagaaaacctgtatctggtgacagaaactctggagacggtaaaggaggaaaccctgaaaagcgaccggcaatataaattttggagccagatctctcagggccatctcagctataaacacaagggccaaagggaagtgaccatccccccaaatcgggtcctgagctatcgagtaaagcagcttgtcttccccaacaaggagacgatgaagaaggatggtgcttcatcctgtttaggaaagtctttgggttcggaggattccagaaacatgaaggagaagttggaggacatggagagtgtcctcaaggacctgacagaggagaagagaaaagatgtgctaaactccctcgctaagtgcctcggcaaggaggatattcggcaggatctagagcaaagagtatctgaggtcctgatttccggggagctacacatggaggacccagacaagcctctcctaagcagcctttttaatgctgctggggtcttggtagaagcgcgtgcaaaagccattctggacttcctggatgccctgctagagctgtctgaagagcagcagtttgtggctgaggccctggagaaggggacccttcctctgttgaaggaccaggtgaaatctgtcatggagcagaactgggatgagctggccagcagtcctcctgacatggactatgaccctgaggcacgaattctctgtgcgctgtatgttgttgtctctatcctgctggagctggctgaggggcctacctctgtctcttcctaactacaaaagccctttctccccacaagcctctgggttttccctttaccagtctgtcctcactgccatcgccactaccatcctgtcaccagtgggacctctttaaaacaagcagccaaccattctttgatgtatcccattcgctccatgttaacatccaaaaccagcctggatttcatacatggacttctgattaaaagtggcaggttgtgcatgttaaaaaaaaaaaaaaaaaaaa

SEQ ID NO: 110 - protein, 403 aa, Homo sapiens
  gasdermin-like (GSDML), gasdermin B (GSDMB), isoform 2, PRO2521
MFSVFEEITRIVVKEMDAGGDMIAVRSLVDADRFRCFHLVGEKRTFFGCRHYTTGLTLMDILDTDGDKWLDELDSGLQGQKAEFQILDNVDSTGELIVRLPKEITISGSFQGFHHQKIKISENRISQQYLATLENRKLKRELPFSFRSINTRENLYLVTETLETVKEETLKSDRQYKFWSQISQGHLSYKHKGQREVTIPPNRVLSYRVKQLVFPNKETMKKDGASSCLGKSLGSEDSRNMKEKLEDMESVLKDLTEEKRKDVLNSLAKCLGKEDIRQDLEQRVSEVLISGELHMEDPDKPLLSSLFNAAGVLVEARAKAILDFLDALLELSEEQQFVAEALEKGTLPLLKDQVKSVMEQNWDELASSPPDMDYDPEARILCALYVVVSILLELAEGPTSVSS

SEQ ID NO: 111 - DNA, 1646 bp, Homo sapiens
  proteasome (prosome, macropain) 26S subunit, non-ATPase, 3 (PSMD3)
gtggaatgtcatcagttaaggctattttcatttcttttgtggatcttcagttgcttcaggccatctggatgtatacatgcaggtcacagggaatatgatggcttagcttgggttcagaggcctgacacctcaggctgccaaatgtggaagatttaaatacttgaaccaataccctcctcccaaaaactgaaattggcttctgtttctgagttggtccaggcgcaatgttcagcgtatttgaggaaatcacaagaattgtagttaaggagatggatgctggaggggatatgattgccgttagaagccttgttgatgctgatagattccgctgcttccatctggtgggggagaagagaactttctttggatgccggcactacacaacaggcctcaccctgatggacattctggacacagatggggacaagtggttagatgaactggattctgggctccaaggtcaaaaggctgagtttcaaattctggataatgtagactcaacgggagagttgatagtgagattacccaaagaaataacaatttcaggcagtttccagggcttccaccatcagaaaatcaagatatcggagaaccggatatcccagcagtatctggctacccttgaaaacaggaagctgaagagggaactacccttttcattccgatcaattaatacgagagaaaacctgtatctggtgacagaaactctggagacggtaaaggaggaaaccctgaaaagcgaccggcaatataaattttggagccagatctctcagggccatctcagctataaacacaagggccaaagggaagtgaccatccccccaaatcgggtcctgagctatcgagtaaagcagcttgtcttccccaacaaggagacgatgagaaagtctttgggttcggaggattccagaaacatgaaggagaagttggaggacatggagagtgtcctcaaggacctgacagaggagaagagaaaagatgtgctaaactccctcgctaagtgcctcggcaaggaggatattcggcaggatctagagcaaagagtatctgaggtcctgatttccggggagctacacatggaggacccagacaagcctctcctaagcagcctttttaatgctgctggggtcttggtagaagcgcgtgcaaaagccattctggacttcctggatgccctgctagagctgtctgaagagcagcagtttgtggctgaggccctggagaaggggacccttcctctgttgaaggaccaggtgaaatctgtcatggagcagaactgggatgagctggccagcagtcctcctgacatggactatgaccctgaggcacgaattctctgtgcgctgtatgttgttgtctctatcctgctggagctggctgaggggcctacctctgtctcttcctaactacaaaagccctttctccccacaagcctctgggttttccctttaccagtctgtcctcactgccatcgccactaccatcctgtcaccagtgggacctctttaaaacaagcagccaaccattctttgatgtatcccattcgctccatgttaacatccaaaaccagcctggatttcatacatggacttctgattaaaagtggcaggttgtgcatgttaaaaaaaaaaaaaaaaaaaaaa

SEQ ID NO: 112 - protein, 394 aa, Homo sapiens
  proteasome (prosome, macropain) 26S subunit, non-ATPase, 3 (PSMD3)
MFSVFEEITRIVVKEMDAGGDMIAVRSLVDADRFRCFHLVGEKRTFFGCRHYTTGLTLMDILDTDGDKWLDELDSGLQGQKAEFQILDNVDSTGELIVRLPKEITISGSFQGFHHQKIKISENRISQQYLATLENRKLKRELPFSFRSINTRENLYLVTETLETVKEETLKSDRQYKFWSQISQGHLSYKHKGQREVTIPPNRVLSYRVKQLVFPNKETMRKSLGSEDSRNMKEKLEDMESVLKDLTEEKRKDVLNSLAKCLGKEDIRQDLEQRVSEVLISGELHMEDPDKPLLSSLFNAAGVLVEARAKAILDFLDALLELSEEQQFVAEALEKGTLPLLKDQVKSVMEQNWDELASSPPDMDYDPEARILCALYVVVSILLELAEGPTSVSS

SEQ ID NO: 113 - DNA, 2174 bp, Homo sapiens
  zinc finger protein 217 (ZNF217)
agaaggcccagcgccgggaaggggtttgcagctgctccgtcatcgtgcggcccgacgctatctcgcgctcgtgtgcaggcccggctcggctcctggtccccggtgcgagggttaacgcgaggccccggcctcggtccccggactaggccgtgaccccgggtgccatgaagcaggagggctcggcgcggcgccgcggcgcggacaaggcgaaaccgccgcccggcggaggagaacaagaacccccaccgccgccggccccccaggatgtggagatgaaagaggaggcagcgacgggtggcgggtcgacgggggaggcagacggcaagacggcggcggcagcggctgagcactcccagcgagagctggacacagtcaccttggaggacatcaaggagcacgtgaaacagctagagaaagcggtttcaggcaaggagccgagattcgtgctgcgggccctgcggatgctgccttccacatcacgccgcctcaaccactatgttctgtataaggctgtgcagggcttcttcacttcaaataatgccactcgagactttttgctccccttcctggaagagcccatggacacagaggctgatttacagttccgtccccgcacgggaaaagctgcgtcgacacccctcctgcctgaagtggaagcctatctccaactcctcgtggtcatcttcatgatgaacagcaagcgctacaaagaggcacagaagatctctgatgatctgatgcagaagatcagtactcagaaccgccgggccctagaccttgtagccgcaaagtgttactattatcacgcccgggtctatgagttcctggacaagctggatgtggtgcgcagcttcttgcatgctcggctccggacagctacgcttcggcatgacgcagacgggcaggccaccctgttgaacctcctgctgcggaattacctacactacagcttgtacgaccaggctgagaagctggtgtccaagtctgtgttcccagagcaggccaacaacaatgagtgggccaggtacctctactacacagggcgaatcaaagccatccagctggagtactcagaggcccggagaacgatgaccaacgcccttcgcaaggcccctcagcacacagctgtcggcttcaaacagacggtgcacaagcttctcatcgtggtggagctgttgctgggggagatccctgaccggctgcagttccgccagccctccctcaagcgctcactcatgccctatttccttctgactcaagctgtcaggacaggaaacctagccaagttcaaccaggtcctggatcagtttggggagaagtttcaagcagatgggacctacaccctaattatccggctgcggcacaacgtgattaagacaggtgtacgcatgatcagcctctcctattcccgaatctccttggctgacatcgcccagaagctgcagttggatagccccgaagatgcagagttcattgttgccaaggccatccgggatggtgtcattgaggccagcatcaaccacgagaagggctatgtccaatccaaggagatgattgacatctattccacccgagagccccagctagccttccaccagcgcatctccttctgcctagatatccacaacatgtctgtcaaggccatgaggtttcctcccaaatcgtacaacaaggacttggagtctgcagaggaacggcgtgagcgagaacagcaggacttggagtttgccaaggagatggcagaagatgatgatgacagcttcccttgagctggggggctggggaggggtagggggaatggggacaggctctttcccccttgggggtcccctgcccagggcactgtccccattttcccacacacagctcatatgctgcattcgtgcagggggtgggggtgctgggagccagccaccctgacctcccccagggctcctccccagccggtgacttactgtacagcaggcaggagggtgggcaggcaacctccccgggcagggtcctggccagcagtgtgggagcaggaggggaaggatagttctgtgtactcctttagggagtgggggactagaactgggatgtcttggcttgtatgttttttgaagcttcgattatgatttttaaacaataaaaagttctccacagtgaaaaaaaaaaaaaaaaaaaaaaaaaaa

SEQ ID NO: 114 - protein, 534 aa, Homo sapiens
  zinc finger protein 217 (ZNF217)
MKQEGSARRRGADKAKPPPGGGEQEPPPPPAPQDVEMKEEAATGGGSTGEADGKTAAAAAEHSQRELDTVTLEDIKEHVKQLEKAVSGKEPRFVLRALRMLPSTSRRLNHYVLYKAVQGFFTSNNATRDFLLPFLEEPMDTEADLQFRPRTGKAASTPLLPEVEAYLQLLVVIFMMNSKRYKEAQKISDDLMQKISTQNRRALDLVAAKCYYYHARVYEFLDKLDVVRSFLHARLRTATLRHDADGQATLLNLLLRNYLHYSLYDQAEKLVSKSVFPEQANNNEWARYLYYTGRIKAIQLEYSEARRTMTNALRKAPQHTAVGFKQTVHKLLIVVELLLGEIPDRLQFRQPSLKRSLMPYFLLTQAVRTGNLAKFNQVLDQFGEKFQADGTYTLIIRLRHNVIKTGVRMISLSYSRISLADIAQKLQLDSPEDAEFIVAKAIRDGVIEASINHEKGYVQSKEMIDIYSTREPQLAFHQRISFCLDIHNMSVKAMRFPPKSYNKDLESAEERREREQQDLEFAKEMAEDDDDSFP

SEQ ID NO: 115 - DNA, 5653 bp, Homo sapiens
  breast carcinoma amplified sequence 1 (BCAS1), novel amplified in breast cancer-1 (NABC1)
gacaaagagaactaatgctttgtgctgattcatatttgaatcgaggcattgggaaccctgtatgccttgtttgtggaaagaaccagtgacaccatcactgagcttcctaaaagttcgaagaagttagaggactatacactttcttttgaacttttataataaatatttgctctggtttttggaacccagggctgttagaggggtgagtgacaagtcttacaagtggccttattccaactccagaaattgcccaacggaactttgagattatatgcaatcgaaagtgacaggaaacatgccaactcaatccctcttaatgtacatggatgggccagaagtgattggcagctctcttggcagtccgatggagatggaggatgccttgtcaatgaaagggaccgctgttgttccattccgagctacacaagaaaaaaatgtcatccaaatcgaggggtatatgcccttggattgcatgttctgcagccagaccttcacacattcagaagaccttaataaacatgtcttaatgcaacaccggcctaccctctgtgaaccagcagttcttcgggttgaagcagagtatctcagtccgcttgataaaagtcaagtgcgaacagaacctcccaaggaaaagaattgcaaggaaaatgaatttagctgtgaggtatgtgggcagacatttagagtcgcttttgatgttgagatccacatgagaacacacaaagattctttcacttacgggtgtaacatgtgcggaagaagattcaaggagccttggtttcttaaaaatcacatgcggacacataatggcaaatcgggggccagaagcaaactgcagcaaggcttggagagtagtccagcaacgatcaacgaggtcgtccaggtgcacgcggccgagagcatctcctctccttacaaaatctgcatggtttgtggcttcctatttccaaataaagaaagtctaattgagcaccgcaaggtgcacaccaaaaaaactgctttcggtaccagcagcgcgcagacagactctccacaaggaggaatgccgtcctcgagggaggacttcctgcagttgttcaacttgagaccaaaatctcaccctgaaacggggaagaagcctgtcagatgcatccctcagctcgatccgttcaccaccttccaggcttggcagctggctaccaaaggaaaagttgccatttgccaagaagtgaaggaatcggggcaagaagggagcaccgacaacgacgattcgagttccgagaaggagcttggagaaacaaataagggcagttgtgcaggcctctcgcaagagaaagagaagtgcaaacactcccacggcgaagcgccctccgtggacgcggatcccaagttacccagtagcaaggagaagcccactcactgctccgagtgcggcaaagctttcagaacctaccaccagctggtcttgcactccagggtccacaagaaggaccggagggccggcgcggagtcgcccaccatgtctgtggacgggaggcagccggggacgtgttctcctgacctcgccgcccctctggatgaaaatggagccgtggatcgaggggaaggtggttctgaagacggatctgaggatgggcttcccgaaggaatccatctggataaaaatgatgatggaggaaaaataaaacatcttacatcttcaagagagtgtagttattgtggaaagtttttccgttcaaattattacctcaatattcatctcagaacgcatacaggtgaaaaaccatacaaatgtgaattttgtgaatatgctgcagcccagaagacatctctgaggtatcacttggagagacatcacaaggaaaaacaaaccgatgttgctgctgaagtcaagaacgatggtaaaaatcaggacactgaagatgcactattaaccgctgacagtgcgcaaaccaaaaatttgaaaagattttttgatggtgccaaagatgttacaggcagtccacctgcaaagcagcttaaggagatgccttctgtttttcagaatgttctgggcagcgctgtcctctcaccagcacacaaagatactcaggatttccataaaaatgcagctgatgacagtgctgataaagtgaataaaaaccctacccctgcttacctggacctgttaaaaaagagatcagcagttgaaactcaggcaaataacctcatctgtagaaccaaggcggatgttactcctcctccggatggcagtaccacccataaccttgaagttagccccaaagagaagcaaacggagaccgcagctgactgcagatacaggccaagtgtggattgtcacgaaaaacctttaaatttatccgtgggggctcttcacaattgcccggcaatttctttgagtaaaagtttgattccaagtatcacctgtccattttgtaccttcaagacattttatccagaagttttaatgatgcaccagagactggagcataaatacaatcctgacgttcataaaaactgtcgaaacaagtccttgcttagaagtcgacgtaccggatgcccgccagcgttgctgggaaaagatgtgcctcccctctctagtttctgtaaacccaagcccaagtctgctttcccggcgcagtccaaatccctgccatctgcgaaggggaagcagagccctcctgggccaggcaaggcccctctgacttcagggatagactctagcactttagccccaagtaacctgaagtcccacagaccacagcagaatgtgggggtccaaggggccgccaccaggcaacagcaatctgagatgtttcctaaaaccagtgtttcccctgcaccggataagacaaaaagacccgagacaaaattgaaacctcttccagtagctccttctcagcccaccctcggcagcagtaacatcaatggttccatcgactaccccgccaagaacgacagcccgtgggcacctccgggaagagactatttctgtaatcggagtgccagcaatactgcagcagaatttggtgagccccttccaaaaagactgaagtccagcgtggttgcccttgacgttgaccagcccggggccaattacagaagaggctatgaccttcccaagtaccatatggtcagaggcatcacatcactgttaccgcaggactgtgtgtatccgtcgcaggcgctgcctcccaaaccaaggttcctgagctccagcgaggtcgattctccaaatgtgctgactgttcagaagccctatggtggctccgggccactttacacttgtgtgcctgctggtagtccagcatccagctcgacgttagaaggaaaaaggcctgtgtcatatcaacacttatctaacagcatggcacaaaagagaaactatgagaattttattgggaatgcacattatcgaccaaatgacaaaaaaacttgattcactaattagggggaaaaaaggtcttggtggatgtcagtgcttactccccatgaaattaaattttacttcatcctttgagaagcgaatggtgaaagctactgaaataagctgtgattgtactgtacataaaacatatgaggaatctgcaaggaacactacagttgtgtaaagttgttctgttaacttttgtaccaaatagcaatacaaactagttggaacagttggaacttacatacatggggactggaaatctctattttgtccctgaataatatttttcttagaattgaccaaataagaagtggaatttttgcatacttgagcgctgctgaaaagaaatcatttgggttgggtggggcgggatgggggaaaagtatataatgcttgcacctcaggtaaaaatctgtaaatatctaagttgtaaacctgcttgttcaaatactgtgtgtattccttttctctaatgcagctcatcacttggagcagtttctgctattgtgctctttcatttaaaatgtatgtttttttttttttaaactgtcaatgattttgtattatgttgaatccacccaaatctattgttgtcttaaaattgttaatggaagtattgaccctctatgatatgtgctgcagatatcgaggtcagccattcggaagctggcagcattttatcgcaactttgagcatctcagatggggaaggcaccttcttcctcgcctctccagattgtcctggaacctccaggatccttgactgagggcgttgggatggcttgtaggatttttaagagagtgtgtctacagacaagcattttctctgtagagcagccacacgttgtataaacataaactgtatgtgcagttatttaaatttgtttctgtcaaattaatcatttttgttggacgattcagtggcgggggggttttgcctaaattagtatataaaaacaaaaatgctaaattatatctgtgaattgcaggtattggggaacagttttaagggaaattttggggggaacattttaggtttgtatttggtagtcttaatgtatctggcatttgggtgaactgtggacatactagagttgattatagacacattgattttgaataaggaactgctggccgagcccgctgggagtctagaaagagaaaatctgtttctagacctcagttattttcccatttttggttgttttgaagcagtaacatttttctcagtgcacatgcaatttgggttttagagaagatggccaccagctggcttcctagatattttaaacttttgttctttaatatgctgtccatggctgagtttattagtacatgggcttagtgaccacaaaatattttattaagaaactgtttcaaaaataaatttgcactgttcatttttctggcctcgctgttctccatagagcaagggtaatcctagaaaaaattttttttttttaaattatgcaacgtaagatgtcctccttgatagaagtcttagctcctgtgttacaagggagaactcatttgagatcagtctgttggcattgcaatgaagtgctttgtatcaggaaagtgtacactattgaccttttttcctgttcacaagctgagccatatgtacataatctagattttgttttcatagttttgcacttttatagcctatttttgaagattaacacatttgcaagatgattgactcaatctttgcctaatccaatgagtgttacagagagcttgctgtgactagaaccataaatcttaaagggggtatgtgataatagagggctggaatttaaacctgtatttaaaaaaaagaatcaccaaatctatttgaaaacaagtcgatttgtattatgctggaattttttgggctttcagatttctctttttaaccacatttctgaatgtataaaaataccaattattttcctacagccctttgtacttcaaaatatgtttttgtgtccatcagtattaactattggtatactactggttttatatttttttttctttgagacaacagtacatataatagaggtacaattcgttggatttttgtttatgtatttatttcattccagtttgatttattttaattgttgatacttaagttgtcgaacagtagacattacttgttttatttatgatatatttcagcttaaagttatgttattatatgtggaagtgtaaatatagatttggtgttttgcaaaaaaaaaaaaaaaaaaaa

SEQ ID NO: 116 - protein, 1048 aa, Homo sapiens
  breast carcinoma amplified sequence 1 (BCAS1), novel amplified in breast cancer-1 (NABC1)
MQSKVTGNMPTQSLLMYMDGPEVIGSSLGSPMEMEDALSMKGTAVVPFRATQEKNVIQIEGYMPLDCMFCSQTFTHSEDLNKHVLMQHRPTLCEPAVLRVEAEYLSPLDKSQVRTEPPKEKNCKENEFSCEVCGQTFRVAFDVEIHMRTHKDSFTYGCNMCGRRFKEPWFLKNHMRTHNGKSGARSKLQQGLESSPATINEVVQVHAAESISSPYKICMVCGFLFPNKESLIEHRKVHTKKTAFGTSSAQTDSPQGGMPSSREDFLQLFNLRPKSHPETGKKPVRCIPQLDPFTTFQAWQLATKGKVAICQEVKESGQEGSTDNDDSSSEKELGETNKGSCAGLSQEKEKCKHSHGEAPSVDADPKLPSSKEKPTHCSECGKAFRTYHQLVLHSRVHKKDRRAGAESPTMSVDGRQPGTCSPDLAAPLDENGAVDRGEGGSEDGSEDGLPEGIHLDKNDDGGKIKHLTSSRECSYCGKFFRSNYYLNIHLRTHTGEKPYKCEFCEYAAAQKTSLRYHLERHHKEKQTDVAAEVKNDGKNQDTEDALLTADSAQTKNLKRFFDGAKDVTGSPPAKQLKEMPSVFQNVLGSAVLSPAHKDTQDFHKNAADDSADKVNKNPTPAYLDLLKKRSAVETQANNLICRTKADVTPPPDGSTTHNLEVSPKEKQTETAADCRYRPSVDCHEKPLNLSVGALHNCPAISLSKSLIPSITCPFCTFKTFYPEVLMMHQRLEHKYNPDVHKNCRNKSLLRSRRTGCPPALLGKDVPPLSSFCKPKPKSAFPAQSKSLPSAKGKQSPPGPGKAPLTSGIDSSTLAPSNLKSHRPQQNVGVQGAATRQQQSEMFPKTSVSPAPDKTKRPETKLKPLPVAPSQPTLGSSNINGSIDYPAKNDSPWAPPGRDYFCNRSASNTAAEFGEPLPKRLKSSVVALDVDQPGANYRRGYDLPKYHMVRGITSLLPQDCVYPSQALPPKPRFLSSSEVDSPNVLTVQKPYGGSGPLYTCVPAGSPASSSTLEGKRPVSYQHLSNSMAQKRNYENFIGNAHYRPNDKKT

SEQ ID NO: 117 - DNA, 2813 bp, Homo sapiens
  cleavage stimulation factor, 3' pre-RNA, subunit 1, 50kDa (CSTF1)
ctccaccgacagccaggcactgggcagcacgcactggagacccaggaccctgtgcaggagcagctccgggtgacacgaggggactgaagatactcccacaggggctcagcaggagcaatgggtaaccaaatgagtgttccccaaagagttgaagaccaagagaatgaaccagaagcagagacttaccaggacaacgcgtctgctctgaacggggttccagtggtggtgtcgacccacacagttcagcacttagaggaagtcgacttgggaataagtgtcaagacggataatgtggccacttcttcccccgagacaacggagataagtgctgttgcggatgccaacggaaagaatcttgggaaagaggccaaacccgaggcaccagctgctaaatctcgttttttcttgatgctctctcggcctgtaccaggacgtaccggagaccaagccgcagattcatcccttggatcagtgaagcttgatgtcagctccaataaagctccagcgaacaaagacccaagtgagagctggacacttccggtggcagctggaccggggcaggacacagataaaaccccagggcacgccccggcccaagacaaggtcctctctgccgccagggatcccacgcttctcccacctgagacagggggagcaggaggagaagctccctccaagcccaaggactccagcttttttgacaaattcttcaagctggacaagggacaggaaaaggtgccaggtgacagccaacaggaagccaagagggcagagcatcaagacaaggtggatgaggttcctggcttatcagggcagtccgatgatgtccctgcagggaaggacatagttgacggcaaggaaaaagaaggacaagaacttggaactgcggattgctctgtccctggggacccagaaggactggagactgcaaaggacgattcccaggcagcagctatagcagagaataataattccatcatgagtttctttaaaactctggtttcacctaacaaagctgaaacaaaaaaggacccagaagacacgggtgctgaaaagtcacccaccacttcagctgaccttaagtcagacaaagccaactttacatcccaggagacccaaggggctggcaagaattccaaaggatgcaacccatcggggcacacacagtccgtgacaacccctgaacctgcgaaggaaggcaccaaggagaaatcaggacccacctctctgcctctgggcaaactgttttggaaaaagtcagttaaagaggactcagtccccacaggtgcggaggagaatgtggtgtgtgagtcaccagtagagattataaagtccaaggaagtagaatcagccttacaaacagtggacctcaacgaaggagatgctgcacctgaacccacagaagcgaaactcaaaagagaagaaagcaaaccaagaacctctctgatggcgtttctcagacaaatgtcagtgaaaggggatggagggatcacccactcagaagaaataaatgggaaagactccagctgccaaacatcagactccacagaaaagactatcacaccgccagagcctgaaccaacaggagcaccacagaagggtaaagagggctcctcgaaggacaagaagtcagcagccgagatgaacaagcagaagagcaacaagcaggaagccaaagaaccagcccagtgcacagagcaggccacggtggacacgaactcactgcagaatggggacaagctccaaaagagacctgagaagcggcagcagtcccttgggggcttctttaaaggcctgggaccaaagcggatgttggatgctcaagtgcaaacagacccagtatccatcggaccagttggcaaacccaagtaaacaaatcagcacggttcccaccaggttctcctgccaccaagatgtgttctccttactccatctcctccccaaacacgctccatgtatatattcttctgatggccagcaaatgaaattctgcctagaaattaagcccgagctgttgtatattgaggtgtattatttacgtctctggtccagtcttttctggcaaataacagtaaagatggtttagcaggtcacctagttgggtcagaagagtcgatgatcaccaagcaggaaagggagggaatagaggaatgtgttcgggttaagtgatgaaaatggcagtggtggccgggcgtggtggctctcgcctgtaatctcagcactttgggaggccgaggcaggtggatcacctgaggtcaggagttcaagactagcctggccaacatcatgaaaccccgtctctactaaaaatacaaaaattagccaggcatggtggcacacacctgtagtcccagctactcgggagcccaacgcacgagaaccgcttgtacccaggaggtggaggttgcagtgagccgaagttgcaccattgcactccaccctgggcgacagagcaagattctatcaaaaaaaaaaggcagtggcaagtaagttatagaagagaaatgctgctagaaggaattaagcgttgtagtaaacgcgtgctcatcctctaagcttgaagaagggagacgaaaatccatttgtttaaattcacatctcaaggagggagaacccgggctgtgttgggtggttgccaatttcctagaacggaatgtgtggggtatagaaaaaggaatgaataagcgttgtttttcaaatagggtccttgtaagttattgatgagagggaaaagattgactggggagggcttaaaatgatttgggaaaacaattgcttttgaggctcagtgacaacggcaaagattacaactt

SEQ ID NO: 118 - protein, 584 aa, Homo sapiens
  cleavage stimulation factor, 3' pre-RNA, subunit 1, 50kDa (CSTF1)
MGNQMSVPQRVEDQENEPEAETYQDNASALNGVPVVVSTHTVQHLEEVDLGISVKTDNVATSSPETTEISAVADANGKNLGKEAKPEAPAAKSRFFLMLSRPVPGRTGDQAADSSLGSVKLDVSSNKAPANKDPSESWTLPVAAGPGQDTDKTPGHAPAQDKVLSAARDPTLLPPETGGAGGEAPSKPKDSSFFDKFFKLDKGQEKVPGDSQQEAKRAEHQDKVDEVPGLSGQSDDVPAGKDIVDGKEKEGQELGTADCSVPGDPEGLETAKDDSQAAAIAENNNSIMSFFKTLVSPNKAETKKDPEDTGAEKSPTTSADLKSDKANFTSQETQGAGKNSKGCNPSGHTQSVTTPEPAKEGTKEKSGPTSLPLGKLFWKKSVKEDSVPTGAEENVVCESPVEIIKSKEVESALQTVDLNEGDAAPEPTEAKLKREESKPRTSLMAFLRQMSVKGDGGITHSEEINGKDSSCQTSDSTEKTITPPEPEPTGAPQKGKEGSSKDKKSAAEMNKQKSNKQEAKEPAQCTEQATVDTNSLQNGDKLQKRPEKRQQSLGGFFKGLGPKRMLDAQVQTDPVSIGPVGKPK

SEQ ID NO: 119 - DNA, 2295 bp, Homo sapiens
  RAE1 RNA export 1 homolog (S. pombe) (RAE1), homolog of yeast Rae1 (Bharathi) mRNA-associated protein of 41 kDa (Kraemer)
aagaacccggaagtggtggagccaacggccagccagacctgtggcagtcccagccccagggtgctctccgcggtcggccatttatcggtgaagcaacagccccttgacgtcaagcttgacgcattggagataaagtccaaggaggtgaactaacctttgaacgtgccactggcagggaaactgtcttccttttctccaagatgtacagaaccaaagtgggcttgaaggaccgccagcagctctacaagctgatcattagccagctgctatatgacggctacatcagcatcgccaatggcctcatcaatgaaatcaagcctcagtctgtgtgtgcaccctcggagcagctcctgcatctcatcaaactcggaatggaaaacgatgacaccgcagttcagtatgcaattggtcgttcagatactgttgcccctggcacagggattgacctggaatttgatgcagatgttcagactatgtccccagaggcttctgagtacgaaacatgctatgtcacatcacataaaggaccatgccgtgtagctacctatagtagagatggacagttaatagctactgggtctgctgatgcttcgataaagatacttgacacagagaggatgttggccaaaagtgccatgccaatagaggtcatgatgaatgagaccgcacaacaaaatatggaaaaccacccagtgattcgaactctttatgaccatgtggatgaagtcacgtgccttgctttccacccaacagaacagatcctggcttctggttcaagggattatactcttaaattatttgattattccaaaccatcagcaaaaagagccttcaaatacattcaggaagctgaaatgttacgttccatctcttttcatccttctggagactttatacttgtcggaactcagcatcctactcttcgcctttatgatatcaacacctttcaatgttttgtctcttgcaatcctcaagatcaacacaccgatgctatatgttccgttaattacaattctagtgccaatatgtacgtaactggaagcaaggacggctgcatcaaattatgggatggtgtttcaaatcgatgcatcacaacttttgagaaagcacatgacggtgctgaagtttgttctgccattttttccaaaaattctaaatacattctctcaagtggaaaagactctgtagctaaactttgggaaatatcaacgggacgaacactggtcagatacacgggcgcgggtttaagtggacgccaggtgcaccggacacaggctgtgtttaaccacaccgaggactatgtgttgctgcccgacgagaggacgatcagtctttgctgctgggactcgaggacagccgagcggagaaacctgctgtcgttggggcacaacaatattgtacgctgcatagtgcactcccccaccaaccccgggttcatgacgtgcagcgatgacttcagagcgcggttttggtaccggagatcgaccactgactgagccaccctctccgtagggttctttctcgaggactctaccctcctcccccacgtcctgtctcagctgcagtcgtaagtccgtgcaccatccttgacgttttgctgccacctctgtccacattcttcttggatttgtataaaagaatctttttttaccttgatgtagaatcatggtggaaaaagttggaaacacagatctgtgcagttctacattcactgattattacagtgtgattttcatcggttttgtaagtacaggacttgccgtttcttttgatctcttgattgaaggaggatagggcattaaagtgcttttgacatgaggaattttcatttggttcttctgtcaactttcttgcttattctgctgaaccctctgtgtatttcccttccaggtatatttgaacagataagcaggcatgcagctctgagactcctgagttttatgccattatcaaaagcattttcaagaatccctcaattctatcctgaaatgatgttattctgataataaagctcagatctgcaactttattgttatatatttttcacttctgtaaaattaatggccagtttttcctgacaatttataggaacagtatctttcaacatactccctacattatccttcaatatctgcaatacttgtctttagtaactgtatttctggtaagattatgatttcatgagaaacaattgaaaatatatccgatctaattaaattaggtcagcctgctattgctctcaggtgttgcctgtcttcacgaatgattagtatcgattgacctctttcttaggtg

SEQ ID NO: 120 - protein, 431 aa, Homo sapiens
  RAE1 RNA export 1 homolog (S. pombe) (RAE1), homolog of yeast Rae1 (Bharathi) mRNA-associated protein of 41 kDa (Kraemer)
MYRTKVGLKDRQQLYKLIISQLLYDGYISIANGLINEIKPQSVCAPSEQLLHLIKLGMENDDTAVQYAIGRSDTVAPGTGIDLEFDADVQTMSPEASEYETCYVTSHKGPCRVATYSRDGQLIATGSADASIKILDTERMLAKSAMPIEVMMNETAQQNMENHPVIRTLYDHVDEVTCLAFHPTEQILASGSRDYTLKLFDYSKPSAKRAFKYIQEAEMLRSISFHPSGDFILVGTQHPTLRLYDINTFQCFVSCNPQDQHTDAICSVNYNSSANMYVTGSKDGCIKLWDGVSNRCITTFEKAHDGAEVCSAIFSKNSKYILSSGKDSVAKLWEISTGRTLVRYTGAGLSGRQVHRTQAVFNHTEDYVLLPDERTISLCCWDSRTAERRNLLSLGHNNIVRCIVHSPTNPGFMTCSDDFRARFWYRRSTTD

SEQ ID NO: 121 - DNA, 1815 bp, Homo sapiens
  RNA-binding region (RNP1, RRM) containing 1 (RNPC1), transcript variant 1, RNA binding motif protein 38 (RBM38), transcript variant 1, ssDNA binding protein SEB4D (HSRNASEB)
agcagtcgcttagtaacttgcagcggctacatcaactttggaccaattcgcaaactgctggtgtaaagcgtttttgcgcatgtgctgtcgccttgcgggaaaaggagcctttttcttcgacgatttccgggcgacgcaggaagtggctccagggcgcacgcgcgttgtttccgcggtagtcagggcagtttctaccgcaggcttaaggaggcttcgggctcctgggatttctgtccgcgctcctggccctcgtccttcgcgccagagcaggttcgcaaactcctcagacccttctgctcccggccgccgctttccgccggggcgagacccccaggttcaaaatgagcctgtttggaacaacctcaggttttggaaccagtgggaccagcatgtttggcagtgcaactacagacaatcacaatcccatgaaggatattgaagtaacatcatctcctgatgatagcattggttgtctgtcttttagcccaccaaccttgccggggaactttcttattgcaggatcatgggctaatgatgttcgctgctgggaagttcaagacagtggacagaccattccaaaagcccagcagatgcacactgggcctgtgcttgatgtctgctggagtgacgatgggagcaaagtgtttacggcatcgtgtgataaaactgccaaaatgtgggacctcagcagtaaccaagcgatacagatcgcacagcatgatgctcctgttaaaaccatccattggatcaaagctccaaactacagctgtgtgatgactgggagctgggataagactttaaagttttgggatactcgatcgtcaaatcctatgatggttttgcaactccctgaaaggtgttactgtgctgacgtgatataccccatggctgtggtggcaactgcagagaggggcctgattgtctatcagctagagaatcaaccttctgaattcaggaggatagaatctccactgaaacatcagcatcggtgtgtggctatttttaaagacaaacagaacaagcctactggttttgccctgggaagtatcgaggggagagttgctattcactatatcaaccccccgaaccccgccaaagataacttcacctttaaatgtcatcgatctaatggaaccaacacttcagctcctcaggacatttatgcggtaaatggaatcgcgttccatcctgttcatggcacccttgcaactgtgggatctgatggtagattcagcttctgggacaaagatgccagaacaaaactaaaaacttcggaacagttagatcagcccatctcagcttgctgtttcaatcacaatggaaacatatttgcatacgcttccagctacgactggtcaaagggacatgaattttataatccccagaaaaaaaattacattttcctgcgtaatgcagccgaagagctaaagcccaggaataagaagtagtggctggagactctggctcagccagagttgtttctctccactctgcctcatctctgtacgaatttgggtcccagccttgttgggttgtcagccatggacatggatttcaacccctggagaaaacgatgtcattgttcagcagctgagagcccaggcgtccgcggcgacttgccgtctctccattccactgcctgttgcagagtttttctgtaactaagggggttgaggttattgtagacgttagattgcgggcaccgccagggattttgcagcgcttcagtgtacgtgttagagaatattggaaaagcgtctgtgagccccgtgctgtattttgtaataaagtcttttgcagattgcttcccgaaaa

SEQ ID NO: 122 - protein, 368 aa, Homo sapiens
  RNA-binding region (RNP1, RRM) containing 1 (RNPC1), isoform a, RNA binding motif protein 38 (RBM38), isoform a, ssDNA binding protein SEB4D (HSRNASEB)
MSLFGTTSGFGTSGTSMFGSATTDNHNPMKDIEVTSSPDDSIGCLSFSPPTLPGNFLIAGSWANDVRCWEVQDSGQTIPKAQQMHTGPVLDVCWSDDGSKVFTASCDKTAKMWDLSSNQAIQIAQHDAPVKTIHWIKAPNYSCVMTGSWDKTLKFWDTRSSNPMMVLQLPERCYCADVIYPMAVVATAERGLIVYQLENQPSEFRRIESPLKHQHRCVAIFKDKQNKPTGFALGSIEGRVAIHYINPPNPAKDNFTFKCHRSNGTNTSAPQDIYAVNGIAFHPVHGTLATVGSDGRFSFWDKDARTKLKTSEQLDQPISACCFNHNGNIFAYASSYDWSKGHEFYNPQKKNYIFLRNAAEELKPRNKK

SEQ ID NO: 123 - DNA, 2401 bp, Homo sapiens
  phosphoenolpyruvate carboxykinase 1 (soluble) (PCK1)
gcagcgccggtcgggagcgcagcgcggcgcagctcggcgcgcacggcgggagcggcgcgcgagtggtcgggcctggcggctggacgggcgcccctcgctgccccgcgcgctccccgccgccccccatgagcgcagccccgcgcggcccgggtccgtaggcggcggggcgccccccatgctgctgcagcccgcgccgtgcgccccgagcgcgggcttcccgcggcccctggccgcccccggcgccatgcacggctcgcagaaggacaccacgttcaccaagatcttcgtgggcggcctgccgtaccacactaccgacgcctcgctcaggaagtacttcgagggcttcggcgacatcgaggaggccgtggtcatcaccgaccgccagacgggcaagtcccgcggctacggcttcgtgaccatggccgaccgggcggcagctgagagggcttgcaaagacccgaaccccatcatcgacggccgcaaggccaacgtgaacctggcatatctgggcgccaagccgcggagcctccagacgggctttgccattggggtgcagcagctgcaccccaccttgatccagcggacttacgggctgaccccgcactacatctacccaccagccatcgtgcagcccagcgtggtgatcccagccgcccctgtcccgtcgctgtcctcgccctacattgagtacacgccggccagcccggcctacgcccagtacccaccggccacctatgaccagtacccatacgccgcctcgcctgccacggctgccagcttcgtgggctacagctaccctgccgccgtgccccaggccctctcagccgcagcacccgcgggcaccactttcgtgcagtaccaggcgccgcagctgcagcctgacaggatgcagtgaggggcgttcctgccccgaggactgtggcattgtcaccttcacagcagacagagctgccaggccatgatgggctggcgacagcccggctgagcttcagtgaggtgccaccagcacccgtgcctccgaagaccgctcgggcattccgcctgcgccctgggacagcggagagacggcttctctttaatctaggtcccattgtgtcttgagggaggactttaagaatgactgagaactatttaaagacgcaatcccaggttccttgcacaccatggcagcctctccttgcaccttctcctgcctctccacactccaggttccctcaggcttgtgtccccactgctgcatcgtggcggggtgtcacagaccctctgcagcccctggctgccctggactgtgcagagatgcctgactccagggaaacctgaaagcaagaagttaatggactgtttattgtaacttgatcctcccgagctgtgagcgcagtctgaggtgtgaggacacggcctcctgttggagtcccattttctccatcagggcacgtgggcggcttcctcaagcccggaggagctcccaggcgcacaggggccgccggtaacaggggccgccggccaaaggcccctttccagtcatagcactgaagttgcaacttttttcttgtaattgttttgctactaagataatttcagaagttcagtctattttttcagcggatactgccgccaccaagaatccaaaacctatttttgacttggagagacttgcttttgttggttccgcccgtggagacgacgatagtgtttctgtataataaagtgtctgccggctcgcgggccaggatcctctcggtgggatgggcaccacagacaggaggcccctcaggcccgtgcgggccactgtctgctgccgcctgccggggtggcagagtgagttgtctcaggaccccgtcactgcgacgttgacactcctctcccttcccttcctccccaactccccaaacactgtggaaggggagaaggaagtgatccacagcattcaggccacttggggtctagaccatggtggtgccagcctggggggggcagtggccctcagctctgcccgctggagcggttgagtgcagaagggtgcgcctcttccctctacccccgcaccacctgctgtgtgccagcctgagacggttcctgcctgtcttgggggttggtggagggtggaggcagttctgccagccgtggcagggctgctatggggcatccagggctgtgggggtctggaggaggggacatgaggtgagaggtatcctggccgagggcggggggcagcggggggtctccctccggacctacctcagggagctgagcgtgcaggcgctccagggcaggcctgggacagagtcaaggctcagagaataaaggtagctaatctcatcataatatttttattagaatgttctgatgataaaaataaaacttgttttctttaaagaaaaaaaaaaaaaaaaaaaaaaaa

SEQ ID NO: 124 - protein, 239 aa, Homo sapiens
  phosphoenolpyruvate carboxykinase 1 (soluble) (PCK1)
MLLQPAPCAPSAGFPRPLAAPGAMHGSQKDTTFTKIFVGGLPYHTTDASLRKYFEGFGDIEEAVVITDRQTGKSRGYGFVTMADRAAAERACKDPNPIIDGRKANVNLAYLGAKPRSLQTGFAIGVQQLHPTLIQRTYGLTPHYIYPPAIVQPSVVIPAAPVPSLSSPYIEYTPASPAYAQYPPATYDQYPYAASPATAASFVGYSYPAAVPQALSAAAPAGTTFVQYQAPQLQPDRMQ

SEQ ID NO: 125 - DNA, 9278 bp, Homo sapiens
  transmembrane, prostate androgen induced RNA (TMEPAI), prostate transmembrane protein, androgen induced 1 (PMEPA1), transcript variant 1
acgctgtaaatgcaggtaatgaaaggatcggatgaaggtcgttggtgactcactgctctgacgttttacttgaactagctgtttctctcccagaagactcagaacataagcacctggaatggatgggtcgcatttaggactccaaatgagttctgctttccctttttgttttcaatctatgtgctctttcaggtactcaaacctgttaccgttttatcagcaaaatgggactttctaccaatttggtgggatgagtctcgccgggagtgatgtgtgtgtcacggaattgtggtcatgcatcgggatggctaattcactgatgtcagatgctaacgaagtggcctcggctactgagcatcacgtcactgttgggtttagacacaacacgatcttatgtatggatgacagcaccactaataacaaatgccagtgacctaaacggggaataacttcaaatgaaacaaaaagcacctcatatcatatttatcctgaaagacacaactggctgaataaaatctgaatacaggaaacatagcaatgggttgataattttggtggaacttgatgatgtgtgacccacgcccaacacagtgtgacccaagcccccaggagggttctctaagtgagtttggtcggaggctgccattcacagtgacttgtatttgccacagcagctctttctaagcccagtcctgggattatctcagggatcatcccacaccccagcggggagatgggccaagtccccacctgacctcatcttaggtagagaggcttccatggaagtgtgggctggctgtggggggttgagacctagccccgttcttttgacatttcaccctgtgttctccaaactccagcaagcagcttccatagctcattaaatttgactgaaggtctgatggcttgcaaagcaaattctttacaactgttataaaggtttcattgcttaagcatataatctagcaaaactgccaagccccctccactccctaaactctaagacttgccagggaagagaacagtggccagtggactgcaggagtaactgcactcagcccagaactccctggaggacacagggaaggttctggaaaggtggcggtacctcacagggagagacgtggtgctccagggcccaacttgctcatgttcagatcctcactctgcaacccaccagccggctgtgagtggctacacaatctctgcctcagtttccctatctgtacatgggttgttcatagcctccacctcagagggtagtaatgatgccaagctcttagaacagtgctcagcatgtgtgcatcctgtgcctactctatgccaagcactacagagagaaaaatgaacaaaatagggagaaatccctgccctcatggagtttacatcggggcagggggcgggggcggcacagagcagacaatcaatacagtgattagcccccagttaggttaggcatttccaatctttgccaataagccacatatttgcccaagttagggtgcatccttcccatgaactttgactgtgacctttgactatggggtgacatcttatagctgtggtgttttgccaaccagcagctcttggtacacaaaatgtgctgctagcaggtgccccggccaaccttgtccttgacccacctgcctgttaagaaaagggtgttgtgttttgcaacagcagtaaaatgggtcaaggtttagtcagttggaagttgtgtcaaaactcactatggttggttgagggctcgaagtctcccagcattcattaacaactatctgttcaatgattatctccctggggcgtgttgcagtgagttggcccaaagcataactgaccctggccgtgatccagagacctgccccctgacgtcagtggcgagcctccctgggtgcagctgaggggcagggctattcttttccacagtatttaaagctgggaggttctgccaccaagcacggccttcccactgggaacacaaacttgctggcgggaagagcccggaaagaaacctgtggatctcccttcgagatcatccaaagagaagaaaggtaagtagagctttgcatttacattttgaaaaattacaaagatgaactcatttttttcctgagagcaataactatttggcaatgcacagccctggcaaaaggccgtcgaatgtgtttgaaggtgtctgttgttgtttttgttcaggacgcttgcgttttctatttcaggtgacctcacattcgtgccccttagcagcactctgcagaaatgcctcctcagctgcaaaacggcctgaacctctcggccaaagttgtccagggaagcctggacagcctaccccaggcagtgagggagtttctcgagaataacgctgagctgtgtcagcctgatcacatccacatctgtgacggctctgaggaggagaatgggcggcttctgggccagatggaggaagagggcatcctcaggcggctgaagaagtatgacaactggtaagctcggcccccgctgcctgtcccagcaccctgcaggcagggctcccctgcgtctcctgggagttggtggagaaaggtgaatgaaggccttcgggtagtttcagactcttgagaagatgaatgcaatggtcagaaccatacagacttgaattttgtgacattagtgggccagcccaagctttaaatgaggtgtgtgcacaaaagctctgccaactagattcctgattaaaaaaaaggcagcccctctcctacagaccaggtcctagtggagtaaatgtccacctggccatgtcttagatggtctgtgtgttcacactgatggactgttgttagcgtgctcagcactctgctaggcatggaaagccacggtactgaaggagatggttcgctgcccgtggtgcttggctgaaaggaagcctgtgatttttgcagctggttggctctcactgaccccagggatgtggccaggatcgaaagcaagacggttatcgtcacccaagagcaaagagacacagtgcccatccccaaaacaggcctcagccagctcggtcgctggatgtcagaggaggattttgagaaagcgttcaatgccaggttcccagggtgcatgaaaggtgagcggaacattgatttgattgggtaaaacagcagagagccttttcttatttacatctatcctaatggtaattcaaacaataatggaagctcccaccacctcagatgtctttcagttccatacatgaagttggcaatgtattgaaaatgcacatccctcttctgcttttacagactgtcttatacaaacgtgaaaactagttccatgcatatgggttttaaatagcttggtgggacccaattgcacatttatgaaaactctttaatttcagcaggctgttcactttccagtggcctcttctaacccagggggctggtgaccagcagggtgtggtggtgttagtggaacaccgtgaaaatgggtctacctgggaaaaaaatgctggtcgtgttcgaagtccaaggtcatttctcaccagtgcccacccatcgcaccctgtaggtcgcaccatgtacgtcatcccattcagcatggggccgctgggctcgcctctgtcaaagatcggcatcgagctgacggattcaccctacgtggtggccagcatgcggatcatgacgcggatgggcacgcccgtcctggaagcactgggcgatggggagtttgtcaaatgcctccattctgtggggtgccctctgcctttacaaagtaagtgtattatttcagaatcaaaagtcaaaataaaaaagaaagctgaacgcaaaccccagtgagtgcctcggggacccccaaccagggccctggcgcactgacttgggaggggtccttgttcacagagcctttggtcaacaactggccctgcaacccggagctgacgctcatcgcccacctgcctgaccgcagagagatcatctcctttggcagtgggtacggcgggaactcgctgctcgggaagaagtgctttgctctcaggatggccagccggctggccaaggaggaagggtggctggcagagcacatgctggtgagcctgcaggaagccctgatgtgcagatgagaggcctggggggtggcagaaacaaacagcattacagttcccacccgtcagcacacctctctgagcgtgcaggttcccggacagatcgggaaaccccaccagtaatgattagtttacacatatacatcgcttttgaaggcccccaaacaccaggggaccatagagatcctttggacttcatgattctgggagtgtttgtttgcactgatacctgaagaaatagatcttgagggcctacattccaacctctgggctgaagtaccaacctcggggagaaggaaacaaagatcacaataaagaatcttgtccccaacagattctgggtataaccaaccctgagggtgagaagaagtacctggcggccgcatttcccagcgcctgcgggaagaccaacctggccatgatgaaccccagcctccccgggtggaaggttgagtgcgtcggggatgacattgcctggatgaagtttgacgcacaaggtgactcttttagacccaactcttggtaacgattggactcaagcgaatcgttggccttcgaaacatgtcacattctcctcagtccagtgtttggatttttaaactctgttagtccagagttggccaagccttagaaatatggatcctgtaagaattcttcaacttaatattcaatctggattgaaactgggccatatgttgctgtttgtttacatacatacatttgtttaaatggtattggtggaaaattgtggaggaagcaagagtcgtaaacgtatcaaagttgcatatgatgcttggatgaaaagagataaatgcatattctagggagggaaaaaagatttgagaagttggcatagaaattagtccggcaatatataagagtatatgttctgctttgcctggcactcactactgcttctctggtttaaaactctccaggtcatttaagggccatcaacccagaaaatggctttttcggtgtcgctcctgggacttcagtgaagaccaaccccaatgccatcaagaccatccagaagaacacaatctttaccaatgtggccgagaccagcgacgggggcgtttactgggaaggcattgatgagccgctagcttcaggcgtcaccatcacgtcctggaagaataaggagtggagctcagaggatggtgtgtccctgccagaggccttggtgtgccgggctgcagggactgcctgtttgagccaggcactcacgagcctttctctgtcttataggggaaccttgtgcccaccccaactcgaggttctgcacccctgccagccagtgccccatcattgatgctgcctgggagtctccggaaggtgttcccattgaaggcattatctttggaggccgtagacctgctggtgaggctctccttcatttaggctgggaacatgggtgtgctgggtaccgaagggcatctgtgaaatctctccttttccatgaccttgtcagagggtgcccaggggcttcctttcttgagcttccttcccaaagatccagaataattggcaagttcaaatgtagaaccaacccttctggtcacctggaacctttctgaatccctgatctattgtagcttgatcaaattttactttttactttgtggcctcagtcatgtaactttgagttagcagttttctgcaatttagcttggtgaacgcaaaactagctcgattacaaagttattgtcttgccgtgtctttccgtgttgtgaataacaccactggttgtggagtctgaatttcaaagcctctgatgaacatttctctttttttttcctgctaaaggtgtccctctagtctatgaagctctcagctggcaacatggagtctttgtgggggcggccatgagatcagaggccacagcggctgcagaacataaaggtaaatcaaagtcctgatctgaaaccacagagaagtgggattagagcactcttcgtcactcttatgtctctctccttttctgtgtctgtgtgtggggagagagagagagagaaagagagagaggagaacaaagcatgctaatgtcaacaatcaatggcgtcagtctttgcctaggagagcctcatttactaatgaactccctctctgtttaacaggcaaaatcatcatgcatgacccctttgccatgcggcccttctttggctacaacttcggcaaatacctggcccactggcttagcatggcccagcacccagcagccaaactgcccaagatcttccatgtcaactggttccggaaggacaaggaaggcaaattcctctggccaggctttggagagaactccagggtgctggagtggatgttcaaccggatcgatggaaaagccagcaccaagctcacgcccataggctacatccccaaggaggatgccctgaacctgaaaggcctggggcacatcaacatgatggagcttttcagcatctccaaggaattctgggagaaggaggtggaagacatcgagaagtatctggaggatcaagtcaatgccgacctcccctgtgaaatcgagagagagatccttgccttgaagcaaagaataagccagatgtaatcagggcctgagtgctttacctttaaaatcattccctttcccatccataaggtgcagtaggagcaagagagggcaagtgttcccaaattgacgccaccataataatcatcaccacaccgtgagcagatctgaaaggcacactttgatttttttaaggataagaaccacagaacactgggtagtagctaatgaaattgagaagggaaatcttagcatgcctccaaaaattcacatccaatgcatagtttgttcaaatttaaggttactcaggcattgatcttttcagtgttttttcactttagctatgtggattagctagaatgcacaccaaaaaaatacttgagctgtatatatatatgtgtgtgtgtgtgtgtgtgtgtgtgtgtgtgtgtgcatgtatgtgcacatgtgtctgtgtggtatatttgtgtatgtgtatttgtatgtactgttattgaaaatatatttaatacctttggaaaaatcttgggcaagatgacctactagttttccttgaaaaaaagttgctttgttattaatattgtgcttaaattatttttatacaccattgttccttacctttacataattgcaatatttcccccttactacttcttggaaaaaaattacaaaatgaagttttatagaaaagatggatttgctttgcttggtttttcttatttgagctaccaagaggagagaactctgattaaatatcttgtgatttaaatcctgccccctccccaagaaggtggggacgttcagaatcacacttgaagagggggtgcattgcctggtcccagggagaaggagggagcagatggggaggaatgaggcagggaaccatggttggggttttctgaatttgctgaagccactagttggcatcctttaacaattctacaaacctttagatggtgaggcttatgtggcaggactgggagggtttaatgcatgctttttgacagtttggatctggaggggtctcaggcttccacaaaaattacattgtggacagtttcataggattttgccttttaactcttcaaagcaacagttttctcaactgtcatccccgcgggggagcagaggaagacaagtgagaaggaaaaggggacaggatctgggttgagcaagcattaattgagcgccttctgtatcccggacatcatgccaacaccatgggctgcccgagaagagaggtgggtggtttggtccccagctctgccttgaaccctcacctgctctcctctactcccagtgtttattggatattccagaacagtccaaacgaaccataaactttatatcacagattcaatctgtgtaaatactattatcttcaagttgtagtttctttcttgggcccaggctgtgaaattggcttcacccctaccacaccccagcgggcaggcttgttcttatgtcacactccacccctccagtctcctcaactggaaaacttgcctcttttcctcacttcctctgctccttacaatggcttcatatggaaggtgaagctgagatcaccccaattttacaggtgaggaaactgagctgaggtcaagctaggagcgtccagcggggctgagaaattgccaggatttccttccccattaaggagctgagagtcttagctccagacacgttggcttgttagaatatcaaaaccaccgaaggggaaaaaccacttactggaattaaatgctatctgctgtattagtttaaatcagtggcgttcaaacttgtttctccttttcactgcggaacacgttcttgacatgtacttgactcagagtcccatgtctaaaggagacagagcccaaggcagcccacctgaagctggggagggagtccaaagtgcaagccacctggtctccatttccccgccccttgggggcctttgggcagctccttggacccctgaaagaggccaccaggataaactttgttaaaatgcatgccttgtgccccactgtcctattacgggctttcagtagtctccactccctcggcaggcaaagacactggccatctccaaattccctcccctcctgcacagcatcagccacctggcaagcagtctcacataggaccatttgccagcaggccctgcaagcctgggggacagcctagaggaggtgacttacatacacagcataagagttttcaggagaccaaaaagattcaatatatgtcattaactcctgactcagtttccccaaaccatgcctcctgagtgctccctctgtctccaaatcctgatttttgtgcgcggacccctgtctacaataaacaggatcctatgacttcattcttcaatgttctcttgtcgtgccttcagatgatgcaaagtatgtaagctaagcccacttgcaggaagctcacagaaggcaagaggctcatcacttgaaaatacggttggagtgagatggaaagcccagagtctcctgattcctggtctaccactggaccacatgactccaaaaccaacactgtgactgacgtcctctactggagtccagtgtaagagctgtcccctgacctccaggaagctgtgttgcagtctgggttaaagaccagaaaacaatagttacacagcaaatgttgaaccaggacaacaaa

SEQ ID NO: 126 - protein, 622 aa, Homo sapiens [sequence omitted]

SEQ ID NO: 127 - DNA, 4930 bp, Homo sapiens
  GTP-binding protein RAB22A, member RAS oncogene family (RAB22A)
aaacccgatctccttggacttgaatgaggaggaggaggcggcggcggcggcggcggcggaggcgctcggctggggaaagctagcggcagaggctcagccccggcggcagcgcgcgccccgctgccagcccattttccggacgccacccgcgggcactgccgacgcccccggggctgccgaggggaggccgggggggcgcagcggagcgcggtcccgcgcactgagccccgcggcgccccgggaacttggcggcgacccgagcccggcgagccggggcgcgcctcccccgccgcgcgcctcctgcatgcggggccccagctccgggcgccggccggagccccccccggccgcccccgagccccccgcgccccgcgccgcgccgccgcgccgtccatgcaccgcttgatgggggtcaacagcaccgccgccgccgccgccgggcagcccaatgtctcctgcacgtgcaactgcaaacgctctttgttccagagcatggagatcacggagctggagtttgttcagatcatcatcatcgtggtggtgatgatggtgatggtggtggtgatcacgtgcctgctgagccactacaagctgtctgcacggtccttcatcagccggcacagccaggggcggaggagagaagatgccctgtcctcagaaggatgcctgtggccctcggagagcacagtgtcaggcaacggaatcccagagccgcaggtctacgccccgcctcggcccaccgaccgcctggccgtgccgcccttcgcccagcgggagcgcttccaccgcttccagcccacctatccgtacctgcagcacgagatcgacctgccacccaccatctcgctgtcagacggggaggagcccccaccctaccagggcccctgcaccctccagcttcgggaccccgagcagcagctggaactgaaccgggagtcggtgcgcgcacccccaaacagaaccatcttcgacagtgacctgatggatagtgccaggctgggcggcccctgcccccccagcagtaactcgggcatcagcgccacgtgctacggcagcggcgggcgcatggaggggccgccgcccacctacagcgaggtcatcggccactacccggggtcctccttccagcaccagcagagcagtgggccgccctccttgctggaggggacccggctccaccacacacacatcgcgcccctagagagcgcagccatctggagcaaagagaaggataaacagaaaggacaccctctctagggtccccaggggggccgggctggggctgcgtaggtgaaaaggcagaacactccgcgcttcttagaagaggagtgagaggaaggcggggggcgcagcaacgcatcgtgtggccctcccctcccacctccctgtgtataaatatttacatgtgatgtctggtctgaatgcacaagctaagagagcttgcaaaaaaaaaaagaaaaaagaaaaaaaaaaaccacgtttctttgttgagctgtgtcttgaaggcaaaagaaaaaaaatttctacagtagtctttcttgtttctagttgagctgcgtgcgtgaatgcttattttcttttgtttatgataatttcacttaactttaaagacatatttgcacaaaacctttgtttaaagatctgcaatattatatatataaatatatataagataagagaaactgtatgtgcgagggcaggagtatttttgtattagaagaggcctattaaaaaaaaaagttgttttctgaactagaagaggaaaaaaatggcaatttttgagtgccaagtcagaaagtgtgtattaccttgtaaagaaaaaaattacaaagcaggggtttagagttatttatataaatgttgagattttgcactattttttaatataaatatgtcagtgcttgcttgatggaaacttctcttgtgtctgttgagactttaagggagaaatgtcggaatttcagagtcgcctgacggcagagggtgagcccccgtggagtctgcagagaggccttggccaggagcggcgggctttcccgaggggccactgtccctgcagagtggatgcttctgcctagtgacaggttatcaccacgttatatattccctaccgaaggagacaccttttcccccctgacccagaacagcctttaaatcacaagcaaaataggaaagttaaccacggaggcaccgagttccaggtagtggttttgcctttcccaaaaatgaaaataaactgttaccgaaggaattagtttttcctcttcttttttccaactgtgaaggtccccgtggggtggagcatggtgcccctcacaagccgcagcggctggtgcccgggctaccagggacatgccagagggctcgatgacttgtctctgcagggcgctttggtggttgttcagctggctaaaggttcaccggtgaaggcaggtgcggtaactgccgcactggaccctaggaagccccaggtattcgcaatctgacctcctcctgtctgtttcccttcacggatcaattctcacttaagaggccaataaacaacccaacatgaaaaggtgacaagcctgggtttctcccaggataggtgaaagggttaaaatgagtaaagcagttgagcaaacaccaacccgagcttcgggcgcagaattcttcaccttctcttcccctttccatctcctttccccgcggaaacaacgcttcccttctggtgtgtctgttgatctgtgttttcatttacatctctcttagactccgctcttgttctccaggttttcaccagatagatttggggttggcgggacctgctggtgacgtgcaggtgaaggacaggaaggggcatgtgagcgtaaatagaggtgaccagaggagagcatgaggggtggggctttgggacccaccggggccagtggctggagcttgacgtctttcctccccatgggggtgggagggcccccagctggaagagcagactcccagctgctaccccctcccttcccatgggagtggctttccattttgggcagaatgctgactagtagactaacataaaagatataaaaggcaataactattgtttgtgagcaacttttttataacttccaaaacaaaaacctgagcacagttttgaagttctagccactcgagctcatgcatgtgaaacgtgtgctttacgaaggtggcagctgacagacgtgggctctgcatgccgccagcctagtagaaagttctcgttcattggcaacagcagaacctgcctctccgtgaagtcgtcagcctaaaatttgtttctctcttgaagaggattctttgaaaaggtcctgcagagaaatcagtacaggttatcccgaaaggtacaaggacgcacttgtaaagatgattaaaacgtatctttcctttatgtgacgcgtctctagtgccttactgaagaagcagtgacactcccgtcgctcggtgaggacgttcccggacagtgcctcactcacctgggactggtatcccctcccagggtccaccaagggctcctgcttttcagacaccccatcatcctcgcgcgtcctcaccctgtctctaccagggaggtgcctagcttggtgaggttactcctgctcctccaacctttttttgccaaggtttgtacacgactcccatctaggctgaaaacctagaagtggaccttgtgtgtgtgcatggtgtcagcccaaagccaggctgagacagtcctcatatcctcttgagccaaactgtttgggtctcgttgcttcatggtatggtctggatttgtgggaatggctttgcgtgagaaaggggaggagagtggttgctgccctcagccggcttgaggacagagcctgtccctctcatgacaactcagtgttgaagcccagtgtcctcagcttcatgtccagtggatggcagaagttcatggggtagtggcctctcaaaggctgggcgcatcccaagacagccagcaggttgtctctggaaacgaccagagttaagctctcggcttctctgctgagggtgcaccctttcctctagatggtagttgtcacgttatctttgaaaactcttggactgctcctgaggaggccctcttttccagtaggaagttagatgggggttctcagaagtggctgattggaaggggacaagcttcgtttcaggggtctgccgttccatcctggttcagagaaggccgagcgtggctttctctagccttgtcactgtctccctgcctgtcaatcaccacctttcctccagaggaggaaaattatctcccctgcaaagcccggttctacacagatttcacaaattgtgctaagaaccgtccgtgttctcagaaagcccagtgtttttgcaaagaatgaaaagggaccccatatgtagcaaaaatcagggctgggggagagccgggttcattccctgtcctcattggtcgtccctatgaattgtacgtttcagagaaattttttttcctatgtgcaacacgaagcttccagaaccataaaatatcccgtcgataaggaaagaaaatgtcgttgttgttgtttttctggaaactgcttgaaatcttgctgtactatagagctcagaaggacacagcccgtcctcccctgcctgcctgattccatggctgttgtgctgattccaatgctttcacgttggttcctggcgtgggaactgctctcctttgcagccccatttcccaagctctgttcaagttaaacttatgtaagctttccgtggcatgcggggcgcgcacccacgtccccgctgcgtaagactctgtatttggatgccaatccacaggcctgaagaaactgcttgttgtgtatcagtaatcattagtggcaatgatgacattctgaaaagctgcaatacttatacaataaattttacaattctttggaaaaaaaaaaaaaaaaaa

SEQ ID NO: 128 - protein, 287 aa, Homo sapiens
  GTP-binding protein RAB22A, member RAS oncogene family (RAB22A)
MHRLMGVNSTAAAAAGQPNVSCTCNCKRSLFQSMEITELEFVQIIIIVVVMMVMVVVITCLLSHYKLSARSFISRHSQGRRREDALSSEGCLWPSESTVSGNGIPEPQVYAPPRPTDRLAVPPFAQRERFHRFQPTYPYLQHEIDLPPTISLSDGEEPPPYQGPCTLQLRDPEQQLELNRESVRAPPNRTIFDSDLMDSARLGGPCPPSSNSGISATCYGSGGRMEGPPPTYSEVIGHYPGSSFQHQQSSGPPSLLEGTRLHHTHIAPLESAAIWSKEKDKQKGHPL

SEQ ID NO: 129 - DNA, 8702 bp, Homo sapiens
  VAMP (vesicle-associated membrane protein)-associated protein B and C (VAPB)
aggtgacgcggccggcgtcccaagatggcggcggcggcggctcccggaaggccgcggcggcgtcccggctgctaaggcgggccccacgcggctggcagcggacaggccggacctacggccggaggacgggcggcagccgcctctgcgcggaccggggctgggccgtgcggcggcagcggcgccaggggatgctcttgctgggcctggcctctcccttctcaacttagggcggcggcgggcccgcgcccctggctcccgggccatggcgctgagggagctcaaagtgtgtctgctcggggatacaggtgtaggtaaatcgagtattgtgtggcggtttgtggaagacagttttgatccaaacatcaacccaacaataggggcatcttttatgaccaagactgtccagtaccaaaatgagctacataaattcctaatctgggatacagctggacaagaacgatttcgtgccttagcaccaatgtactatcgagggtcggctgcagctataatcgtttatgatatcacaaaagaagagacattttcaacattaaagaattgggtgaaagagcttcgacagcatggcccacctaatattgtagttgccattgcaggaaataaatgtgatcttatcgatgtaagagaagtcatggagagagatgcaaaggactacgccgactctattcatgcaatttttgtagagaccagcgcaaaaaacgcgataaacataaatgaactctttatagaaattagtcgaagaattccatccactgacgccaacctgccatctggcggtaagggcttcaaactccgaagacagccttcagagccaaagcggagctgctgctgaccgaacctcagcctctcagacttgatgatgaagtaggtggtcctgaaagttaacaggagggctggggtccctgccaccagttttcacctagccagtcttgagtcttctccgtgcaaaaaggattcacagaaatggaccagttctgttctccaaagactgcagcaatgatatttcagtctgtgaacttctattatgtaaagaatctctagtgtacaaagggactacatcgttggcttttgaccttgctgaaaaggaacatataattgtatggatggtaggattaagttgttgagtagttttgtaatcaagattttatgtaacatttgtaaagggaaaattagcacttttgtggttcttaagggaaaagaaacagaccttgtggagattataatttccttggtttctgttaccactgttagagggagttgtatcatttaacatatagtaggatagtttaagtgtagggaggacaattattgtctgaagctaaaatgggttatttataggactgatggaaatgatttcatctctgccatctctaaagcacttttcattgaacatgttagcctaggatacgtacagtaaattaacaatgatagcagcagatgcctagctcatcctgggtttgcttctgaccttgtcatgtgtgtgccaccaaacacgttattggcacctttttaaataagctctcatgatcaagatggtgatggtagagaagctgcccggaataaactgaatttcatatgttctaaaatgactagcaatggtttaaaaaggaagaagagtggaagtgaagaaggtggtataaatgctgtcaatttttttttaacccaagtattttggtggggaaaagcaagtatctattgcttagcatatgtaaagttgtagtctatatttatggggccattgcttaaagattataaattatgtaaatacattaataaattctaagtttcatttgacattccattgaatctcgcacccagtcttgcgtatgcctgcccagttttcagcctcttaacgggagactcaagcacattggtattgtataaaggtatagagcacttagcttacaatctttaaaggtttctctgccttcccttctacccacccgcctcccaccagatcccatctggaaatcataataaagacatatgccactttgacaaacctgactagtccttactagcctgagggtaaaagattaagctccaacctcaagtcatttacctggtcttggtaataagtttcttttagcttgtacagcatcctcagaccaactgaggagctttccttgttaacaatttagcttatctttctgtttcctttatttttcccctgcctctgttagtggttaacactcttttccctcagggagcctaatgaggtttttaatatcatctaaaaataaagcattgaagtgaagttggtgaaaatttgttcctggtctaatttggcacccttccaacctgagtattgtaggggaaggaaatttacaagatttaataggaaatgaaacagcttgaatttcaaactaaattgtattttcagagctatcctgaaactgaacagctgaaactttaaaaaataattggtattattttgtgccccccacttaatatggatagattttaatgggaaaattataattcagattaaataaaaaacaattcccttttccctgttgtatatcttaagcatttggaattttttttatcttctgaaatcatataaaaagaatgtcattagtaaaaattctaacttcgttttgtttaaaagacatgtggatgctccatgcccctaggattttgcttcctccccggtgctaaattagcaagctcctagagaagccatgtgattcccagagccaggcgctttacacctaaagtagtttgactttcttctgtatacatccagatggatcccaggcatccgggcaccaccctggtgtgtccctagaattcccactgctgggcctctatctccatgacaacaaaataaaaacagaggttgcttgactcattaccaaagaggcaaagcatgtgcgaccctttctgtcttattttaccaaaagatggtgcaaatctatgaccttcacattttttccaccacacccaccagtagctgttggtgattgcatggtgtctcggtgcatggggaaaggcaaggtcttctgagctcatcttaactggtgaggcatctggatgtgtctgatcttactgtgatgttttactgtaccgagcccaatgtgggtccatctcatcagccctttgctgatttcatgatttctcaccctccctcccatatgtagggtgtgattctgttttattatagccacatgttttattaacagaatgagtgatatgaagcttgtacttatgcatttctcgggcctcttccctcattttcatcagtctgtctaagaacttgactcggcactgtttctcgtgtaatatccttctaatgcttagcaacaacaacaaaaaattgctctctcagatccataatccatactcagtgaaagcagggaaaaaatattttcacttattttatttgcttctaaaatgcaaagatgaatactaaagtcagaagcagtgtttcattttgaacacattttggattattaagctgactaagcaatgatctaatacacatttcatattttctttataataatttcttatggagaagaggctatatttcaaaggaattgagacatactcccatctataaacatgtttggttttcttacgatacagggccatttttttaaaactctcaggactgaacagaagagaaaaattattaattagctgctactgtatgttgattcttttcggagaaattgaaataagctctttgcaggcgtccaatcctagaaaccaatggtctccagaactctcacacaagtgtttttctgattctatgataactaattaaccatcatctggtgattaaaagaacataaagtaagattatgattaagtgtccatcacctgcctgtcagccgtggtcagaataagttttacacgaagcaggtgaaagatttagttcttttcaaagtaacttattttcttgtgacccgtttatgatgttgtttgaagtccctgtttcccattgtgtacgcactttctggatgtctggaaggatcgggacttttgtgtgagaggcttgagcgcctcctctatgtgggctggtgtccttcttgaagttgtcaattcctcttattcttaaatatctaaagggaaaggaaaccaactttaatttcagaacttctctttacgtcttgtatgtatttcttttctgttctcaaggaggaaaattggtctaggaagccttctaaattaaactctgggaaatatagtaatgaaaatatcctttagctaactttcctgtaactgtcaaaccaaaatgtcagtatttttagggcattgtgttaaaataagcagtttagattccgacgacactgcactaattggcatgtcagcctccagctcagaaaggcatttgctcatggttacaggcatcttttagattctaagagtgagttacagaattctttttggtactttcacttattctttcagaatacatcaaggatgtgatttatgggcccttaagagtataagatataggtgcacagtatgttacttaagtaacggatgagcccccctaaacatccacgtgtctctgcaggaacctgtgtaagtattgtgaaaacccttttcttccagggaaaaattattggaaattccttaactgagctatacttggtacttgctctagaacatttgggaaatgacaaactcaggctggctctcctctctaacctcactgggctataaatgttccttctaactctgtaatgaaagttcagtgacaaactagatagtgaacctgtgaaagtcattatttacatttgctttaaagggacagttttaccgttcaacttcaagagtttttctacctctttaacagttaatattttttaaaggaagaaatggaatgtaccttcaggggtcaagctgttaactgtatacctgcctctagttagcttggtttatcaaaaggatttttaaatgattcaaggtaatgtttaggatatttgttttaactcctgctgtgctgtgatttaaaaaaaaatagtctaagaaacaaatttatccatgagataaacatcatattttatagttttagaaaaaagggttgggggtggaatttagcctagaacttaaagaaacaacctctgcgaatttctcttgacagcggagttgcttgtcttgacttctaataatataaatccaggcagtttgattatccgatttgcaagaaactttaatggaattctggggcatttgtcctgttttatgtgcaaatgaaagtctaaaaaatatgaggaagatattacatttttcaggagcctccattttttcagtctaagagaatgataagtgagaggcctattgtgatgaagttgcattggacataatgtgggaagtgaataaatagaaccaagaatcttcatctatctctgttggtctttcaggattctcttagcatataggaaaatgatttaccttccagatctcgaaggacttccaatagcatagatcaggtttaatttgatggtctataccatcagaaataactaatatctgttttctttccttttagagtataatcaattatggataggccagaatatttttggcttcaaaacaaaaggattcataagcttaaaaaaacaaaaatcccaaaccttccatctatcccttttattacgttgaacattttagatagtaagattaagatgtatcattagtatatggtgaaattaaaaccgtggtgtctaacagatttaacaaaaagtgtttaatttactgcaagttcatttttagatctgtatggtgcccagtactccacaaaatgcatcataattgaaacaacaaaattattttcatgagcaagaattcaagtatcaaggcctatcagccaattaaaagccgtaagatagtaatgattttttttctttttttttttttttctttttttagatggagtctcactctgtcgcccaggctggtatgcagtggcgcgatctcagctcactgcaacctgtctcctgggttcaagcagttctcctgcctcagcctcctgagtagctgggatgacaggcgtgcaccaccatacccagctaatttttgtatttttagtagagatggggtttcaccatgtttgccaggctggtctcgaactcctgacctcaggtgatctgcttgcctcggcttcgcaacattctgggattacagacgtgagccaccgcgcccaaccagtaacgatttttttaaagggcctttcttaattgacagttttaagctgtagacattaatattataacaaacaaaacatgccagttttactgattccgctttttgcttgattcaggaacttttcattgtttggggaagcttttgaatgcagtactgtggaggaaatcatccttaaaatagcatttcacacatagggccaaaattgaaattgtcaaggaaacccctcagcatctaacgtcatcttgtagaagagctgggcatacctcttcctctaggccaattcagaggccactggccacccaagtagagtggggcccactggcatgagtagtccctgtgcccatgcccatggtggtgcttgactttgctttggggcttaatcctagtatcatttggccattaatttttaattaagtttatacttgaataatcagttttactcctgaaaaattttgaagccagcactgactttgtttatattcacttaccttgtatatgaacttatgacattagagtttgtgaaactgtcttaacgtggctcatacacgtgatgtcagagggactggtcagttctttacagggtgaattaatcggcagctggctagtcagagcaactgatgggtggcttttttttctttttttttttgagacggagtctcgctctgtcacccaggctggagtgtaagggcgcgatctcggctcactgcaacctccgcctcccaggttcaagcaattctcctgcctcagccacctgaatagctaggattacaggcgcccgcccccacacccggctaatattttttgtatttttagtagagacagggtttcaccgtgttgatcaggctggtctcgaactcctgacctcacgatccgcccgcctcggcctcccaaagtgctgggattacaggcgtgagtggtggccctatttttaaaccattcgttacgctgtgtagacagagctttattgccctggaaaagattttttttttaactctcatgcagttcagtctttccatcatttcactttgtgagtcactcacataattgtcaatcattcctctgaccttcttaagaatttacaccttaccgtctctgtgattgaagcagacttctcgctttatttcccttaggctcatttttctgtgggctctcccttaaagacacatggccacagacacctccttcgcatatgtaatctgccttcccctgcggccttccgtggtcacagcaacagggactgctcaccccctccagctggggcttttctaacaagcacagtcagaaatgcgcaggcctggggttggggatgaacagaagttgattagtgggcacagaaatacagttagatagaaggaatagttccagcattcgatattacagtagggagactgcatttaacaataattgattgtatatttgaaaacagctagaagaataagaatattcccaacacaaagaaaagataagcgaggtgaaggaaatcccagttaccctcattcagtccattacacattcgatacaggtatcaaaatatcataggcacctcaaagacatgtacaactcttaatttaacatttttgaaagaaaaaaaaaccggccagagcattaaaacaaataaaataagaaacacagaggccagtgttaggtgaagaactccgctgcttcagaaagagaatagcagcgctcgcttaccgtgggaacacggccagttaacaaaatgggttttggttttttgttttgttttgttttaccattggtaataagatagttaacataagtggtcagaacttcgctgaatttgtaataaagcatttgttaagcgtgtaaaagtccaaattaaaagtcttgaagaaaaacagctatggcaatgagcctagacatttttcaaaaaaaaaagctaagccgtcctaccagcaatctctctttctcctaagaatgtcatgccttctcaagacctgatgaaaggaataagatatttgtgcctttttataaaagcatctattacgaaagtaaaattcagttgcttacagttttggccgctttgtagcactattataaacagcccaaatttatggccttggacttactgcatgacacatggcctggttacctgtcatggaatgctgcagtggtggtttgccaagcttctgtggatgtttgaagactttatttttgcagtcttaaccttgggctggacctaagtgtatgtaaaccatatgatgcctgtattgtttatagatgctgacaaaagaaaactagaccttttgttttttgttgtaagatttttgttttcatgcctatgctcatagtagatagtttgcaaatgaaagttgatttgccatacttttaaataatattgttttagcttgaatattctataatacacttttatagagtataacatgctaaatcactgttttgttgtaagaagggtgtaaacattttgttaataaaatgctatgtttacaaatataaaaaaaaaaaaaaaaaaaaaaaaaaaaaaaaaaaaaaaaaaaaaaaaaaaa

SEQ ID NO: 130 - protein, 194 aa, Homo sapiens
  VAMP (vesicle-associated membrane protein)-associated protein B and C (VAPB)
MALRELKVCLLGDTGVGKSSIVWRFVEDSFDPNINPTIGASFMTKTVQYQNELHKFLIWDTAGQERFRALAPMYYRGSAAAIIVYDITKEETFSTLKNWVKELRQHGPPNIVVAIAGNKCDLIDVREVMERDAKDYADSIHAIFVETSAKNAININELFIEISRRIPSTDANLPSGGKGFKLRRQPSEPKRSCC

SEQ ID NO: 131 - DNA, 3689 bp, Homo sapiens
  syntaxin 16 (STX16), transcript variant 1
gcgtgcgtgtgtacgactctgcgtgcgtgcgtgcgtgcgtgcgtgccgtcagctcgccgggcaccgcggcctcgccctcgccctccgcccctgcgcctgcaccgcgtagaccgacccccccccagcgcgcccacccggtagaggacccccgcccgtgccccgaccggtccccgcctttttgtaaaacttaaagcgggcgcagcattaacgcttcccgccccggtgacctctcaggggtctccccgccaaaggtgctccgccgctaaggaacatggcgaaggtggagcaggtcctgagcctcgagccgcagcacgagctcaaattccgaggtcccttcaccgatgttgtcaccaccaacctaaagcttggcaacccgacagaccgaaatgtgtgttttaaggtgaagactacagcaccacgtaggtactgtgtgaggcccaacagcggaatcatcgatgcaggggcctcaattaatgtatctgtgatgttacagcctttcgattatgatcccaatgagaaaagtaaacacaagtttatggttcagtctatgtttgctccaactgacacttcagatatggaagcagtatggaaggaggcaaaaccggaagaccttatggattcaaaacttagatgtgtgtttgaattgccagcagagaatgataaaccacatgatgtagaaataaataaaattatatccacaactgcatcaaagacagaaacaccaatagtgtctaagtctctgagttcttctttggatgacaccgaagttaagaaggttatggaagaatgtaagaggctgcaaggtgaagttcagaggctacgggaggagaacaagcagttcaaggaagaagatggactgcggatgaggaagacagtgcagagcaacagccccatttcagcattagccccaactgggaaggaagaaggccttagcacccggctcttggctctggtggttttgttctttatcgttggtgtaattattgggaagattgccttgtagaggtagcatgcacaggatggtaaattggattggtggatccaccatatcatgggatttaaatttatcataaccatgtgtaaaaagaaattaatgtatgatgacatctcacaggtcttgcctttaaattacccctccctgcacacacatacacagatacacacacacaaatataatgtaacgatcttttagaaagttaaaaatgtatagtaactgattgagggggaaaagaatgatctttattaatgacaagggaaaccatgagtaatgccacaatggcatattgtaaatgtcattttaaacattggtaggccttggtacatgatgctggattacctctcttaaaatgacacccttcctcgcctgttggtgctggcccttggggagctggagcccagcatgctggggagtgcggtcagctccacacagtagtccccacgtggcccactcccggcccaggctgctttccgtgtcttcagttctgtccaagccatcagctccttgggactgatgaacagagtcagaagcccaaaggaattgcactgtggcagcatcagacgtactcgtcataagtgagaggcgtgtgttgactgattgacccagcgctttggaaataaatggcagtgctttgttcacttaaagggaccaagctaaatttgtattggttcatgtagtgaagtcaaactgttattcagagatgtttaatgcatatttaacttatttaatgtatttcatctcatgttttcttattgtcacaagagtacagttaatgctgcgtgctgctgaactctgttgggtgaactggtattgctgctggagggctgtgggctcctctgtctctggagagtctggtcatgtggaggtggggtttattgggatgctggagaagagctgccaggaagtgttttttctgggtcagtaaataacaactgtcatagggagggaaattctcagtagtgacagtcaactctaggttaccttttttaatgaagagtagtcagtcttctagattgttcttataccacctctcaaccattactcacacttccagcgcccaggtccaagtctgagcctgacctccccttggggacctagcctggagtcaggacaaatggatcgggctgcagagggttagaagcgagggcaccagcagttgtgggtggggagcaagggaagagagaaactcttcagcgaatccttctagtactagttgagagtttgactgtgaattaattttatgccataaaagaccaacccagttctgtttgactatgtagcatcttgaaaagaaaaattataataaagccccaaaattaagaattcttttgtcattttgtcacatttgctctatggggggaattattattttatcatttttattattttgccattggaaggttaactttaaaatgagccctatcactgagaaatacgtgtttcatgatttaactctgtgtgtgtgtgtgtgtgtgtgtgtgtgtgtgtgtgtattttttttttggttgtcttcagctgacagtatgaaaaatgaaactgctgaaaaagctgagcacctggtcacccttggccttccattgctttggccttcagtaaaaagcagcctcccttctaggtcagggaaccatgccattgagactagtaacgggcgttctgggcacagtcccactgtgcacaggtttgagaggacaagttcatcagaaggaaggcagtccttagaagtcacatacgttgagccacgttgctcctaagcctggctctgtcaagctgggtcaggggccttgaaactggagaagtggaagtctatggttggtctgagtaagtaacttcctgtcttcatgaaaaaagttgactttgaatcccaggtactcacagaaatggtgaacagacttagttgttacccaggcacccatggattgtgttgagtgtgcagacagggaggccaccccaataggaattcgtctccaggatttttcccatgtgtcccccagtacttataaaagggagtgaaaagaccgagctgtaaggcatgtgccttctgccacctgactttccgtgaggggactaaaatttactaattgtagttgctgcagccagttaagtcctgtagcttccaggccctcatgtctttgataggagagtgcttaggtggtccccaacagtgcctaggggtacagtacagtcccattacactagagcagggctctatttatttttaaaggatatggccgtgtgttttgataaaactttattcacaaaaacagccgggtcatgggatttggcttgtgagtctgtaacagttcttaaaaagaatatctgagaaactactctgttttagacctttgaaggtgatttagagttttgtgtacatctaggagaaggtgttcagcttctcagaggatgtggacattttggttgcagctaaaaatcagtctctgaagtctctctcccttctagaggttaggacttggtgaacatgtttgtgggccttttgactgagtggcagaaggaaactgctcaggaagagaaacaggtgactgatgggaaggttgattattttctcagtcatcctggcagccaaaaatgtgccaggaaaagaaagaatgtggagcacgcgtggctcctggaggacttggagatgcatgcacatttagggtgttttccctagaattacataaaaaaaaaaaaaaaa

SEQ ID NO: 132 - protein, 243 aa, Homo sapiens
  syntaxin 16 (STX16), isoform a
MAKVEQVLSLEPQHELKFRGPFTDVVTTNLKLGNPTDRNVCFKVKTTAPRRYCVRPNSGIIDAGASINVSVMLQPFDYDPNEKSKHKFMVQSMFAPTDTSDMEAVWKEAKPEDLMDSKLRCVFELPAENDKPHDVEINKIISTTASKTETPIVSKSLSSSLDDTEVKKVMEECKRLQGEVQRLREENKQFKEEDGLRMRKTVQSNSPISALAPTGKEEGLSTRLLALVVLFFIVGVIIGKIAL

SEQ ID NO: 133 - DNA, 4959 bp, Homo sapiens
  aminopeptidase-like 1 (NPEPL1), FLJ42065
gagctgcagtcagatccggggatggagggagccggagaagaggagtgagaaggccggggaggcaggccctgctgtcttcctgcaggccggcagcctgctggcagtggaggaccaggccgtccaggaaaggaaggggtcaggaggtcgggcagggcctcagcaggttcagacaagtccccagaagggagctgcaggcgccctcgagtccaggccccaagcctggctccggttgtccaaagagggcctaggccaggcctctggtgcggaaactgagtcacagccagacctcagggcacggcctagacgcttacgagccaaagttaggggtagagagcagagacctccggggggtctcagggagtagggggcttcagggcctcccagtctagagccggattggcgagttagacgcttgtagatccaaggttggattggggtggggtctctgggacgttggatcgctacgcaaggattggggggattcaagtgcttagagatcgaagtctgccctgggtagggggagtcagacaattggaaagcctaggtagttatttggggaggggtctctacgccttggcgaagcgcacagctgcatctttttggcttgaggcctgaggccttgtcgagaagcttccgtgaaagggtgggccagccgggccacgagaaagaaagtgaataaatcaggaatataagtgggcggggggcccctgagaggggggtcgcaaagggtgagacatggccaccaggcgtttaaccgacgctttcttgttgttgcggaataattccatccaaaaccggcagctgttagccgagcaagtgagtagtcacatcacctccagccctctgcattcacgtagcattgctgcggagctggacgagcttgctgatgaccgtatggcactggtgtcaggcatcagcttagatccagaagcagcgattggtgtgacaaaacggccacctcctaagtgggtggatggagtggatgaaattcagtatgatgttggccggattaagcagaagatgaaagaattggccagccttcatgacaagcatttaaacagacccaccctggatgacagcagcgaagaggaacatgccattgagataactacccaagagatcactcagctcttccacaggtgccagcgtgccgtgcaggccctgccgagccgggcccgggcctgctccgagcaggaggggcggctgcttgggaacgtggtggcctcgctggcgcaggccctgcaggaactctccaccagcttccggcacgcacagtcaggctacctcaaacgcatgaagaatcgagaggaaagatcccagcattttttcgacacatcagtaccactaatggatgatggagacgataacactctttaccatcggggttttacagaggaccagttagttctggtggagcagaacacactgatggtggaagagcgggaacgagagattcgccagattgtacagtccatttctgacctgaatgaaatattcagggacttaggggcgatgattgtagaacagggtacagtccttgacagaattgactataacgttgaacagtcctgtatcaaaactgaagatggtttgaaacagcttcacaaggcagaacagtatcaaaagaagaatcggaagatgcttgtgattttaatattatttgtcatcatcattgtgctcattgttgtcctcgttggcgtgaagtctcgataagtggcattgggttttcgtgtgtgccgcgcgtgtggatctcccgggtgtgaggggcttggcctgcgccccgccagctgcccgcagaggtgcagcctcgaggaatctgagggcgtcggggcagcgaacctttgcatccacggactcctccttccctagtcctgctcaagcggtccggggaatgggtttttgtttttccttcattgttgagaatttaaggacctttgatactgctgcacaatagagattgagttctgggatcagttataatatatattttttttagaaagagaaaatgagctgagagtttacaggcactgcagaagctgttcagtattatatgtgtatatgctatttttttagcagccatgtctgagcagaatgttaacataatttttggaaaaattttctttaaaccatctggtttttaagaaatttggtaccaaaaattgatgagtagaggcaaaaatgccccttcatctttctctatatattttccagttgaaaacaaactaagaagtcctttaagaatttataatccgttccccattaacttaatttagcttttccatcactgttaatgatcagagtaacaaagtgtgaaaaataagaaaccatcattgatgttaattaacacatttagatgggccagttaaaacagcttcataagttttaaattaattgtaaatggaatattcctcatttaaaatttttgcactgcattttctactgtaaaccaaaagaggttactaagcaaaaccacctaaatttaagttggtgatttaaatgaatctcacattaaaagaaagcttgacagtgttatgaaagccaccagactcagccagtgtgtccccatgggtatccccagccatccttgctcaatccattacttatatactaactacataatgacctgttcaaaccagactctatttaatgaactgtgaatttacacagaggccattttaaatgggtcaccccatttaggattagtggatctcaaattattaaccaaacatcactccatttcaaagtaaaatattccaccagcgatttgatttattggctcttccattgccactgagcaatgcccaggaagcaggcacattgccaaggactgggggcatcttgactaggaagctcctcgtttgtgtgagcgtgggtcagaccgccaaagtaggacttcatcgtttacctacctattatcaatatggtgcttgaatatattcctataactgtagaacagtgtggaaagtgatggtaactttgaagttgttcatgttttattggctttgttttaattgacactagtagagttttaatggtctttgtgtaaattttaatggcttttccattgtttttgcttctcttaaaaagtttaagaagaatatgacctcattaaatgtgctgttttatttggaccagtcacacaaaatgtctctctagagttgactttaaagttgtttacagaaatttaaactcaattccagagattgaagttgtccaaacagctcatgggcttagtgtccaaacccctgcccagccttccctttccaagttggtgccacctccaggtagccattggtggttttcctattactgatgtggctgtggaatgataaggtcctagaggggccctggcatttcaggaagcggacctggtattccctgacaaacattgcttaggaaagagggccggagaataagaagccagcacctcatcagtcagccctgcaatgtgagacttccgtagctgttgagagtcactgcaggtgttctttcatcccatctgattttaacccatggttgagacgttccaagttagatctgctgctcttaggtgtggggctgtccacattagggaacttgcctcaaaaacagtccacagtggcaataccggacttctgttcaagctttttaaagtgctgagccttacaaacccctgaaggaaggtgaccctttaagagaggatcatctttttttatatttattttcaccaaatagggtgatgagggttggtttttgttccctcaacccatttgggtaaaataacggatctgattagaaactgttttaaggaggggctgggctcggtggctcacgcctgtaatcccagactttgagaggccaaggcggtcacgaggtcaggagttcgagaccagcctagccaacatggtgaaaccccgtctctacaaaaaatacaaaaattagccgggtgggacacgcctgtaatcccagctactcaagaggctgaggcaggagaatagcttgaacccgggaggcagaggttgcagtgagccgagatcacaccactgcactccagcctgggtgacagagcgaggctccgtctcaaaaaaaaaaaaaaaaaattgttttagcgctgggtttcccaaggtgggagagacagacccagcctggagctggcccctggcctgtgtgctgacttcttggggtcctcaaaccactgtatttttctgttgagcctgtacttggggagagatcagtagcatttgaggaagtaagagaaaagaatcatggtacctcagggtttctttccctttactcgctggcagccattgtctgtgggcacctcatgtttttccacactctactgggccgtggaggtaacgatcacccaggccagtctcctctgcctgggatgcgccctctgagaggaggcctagcagggcaggctccctctgggcatccctggatgcagcctctggacacatgcctcctttaaagtgtccgggtgcagctcaggttgagtggaggtagaaggagaaacagacatgtttaccacgcgttttccaaagctcctgatctttcccaagattgtaactgaaaactgctgtctcttgttttgttcgttttgggggtggtggtgctggctgggccatgcttgtgaagtgatgtgtgtctctgatttaacggattcactgttttctctgctaattgagagagcgttatttacattatttatttgttttgacacaagtgctttcagtgttttatcctagctaatggcttcttaaaggtaataaaacccttccaacgtaattggtcagataaaactttttttcttgtatgcttaaataaagcaattagtgaagcacttctatccaaaatgacttttttgtccttttttaaaaccaatttactgttactggaaactttttgtacaataaagcaatcacgcagattaaagaacatcctgcaatcctagtattaattttaaaaaaaaaaaaa

SEQ ID NO: 134 - protein, 325 aa, Homo sapiens
  aminopeptidase-like 1 (NPEPL1), FLJ42065
MATRRLTDAFLLLRNNSIQNRQLLAEQVSSHITSSPLHSRSIAAELDELADDRMALVSGISLDPEAAIGVTKRPPPKWVDGVDEIQYDVGRIKQKMKELASLHDKHLNRPTLDDSSEEEHAIEITTQEITQLFHRCQRAVQALPSRARACSEQEGRLLGNVVASLAQALQELSTSFRHAQSGYLKRMKNREERSQHFFDTSVPLMDDGDDNTLYHRGFTEDQLVLVEQNTLMVEEREREIRQIVQSISDLNEIFRDLGAMIVEQGTVLDRIDYNVEQSCIKTEDGLKQLHKAEQYQKKNRKMLVILILFVIIIVLIVVLVGVKSR

SEQ ID NO: 135 - DNA, 2217 bp, Homo sapiens
  guanine nucleotide binding protein (G protein), alpha stimulating activity polypeptide 1 (GNAS1), GNAS complex locus (GNAS), transcript variant 1
ggggcggtgccgaggccgggccggagcggggcgaagggggccgagcggcgggccgggccgggccgggcagggccggggcgtgggccggcaggaagatggcgaacgtggggctgcagttccaggcgagcgcgggggactcggacccacagagccggcccctgctgctgctcgggcagctgcaccacctgcaccgcgtgccctggagccacgtccgcgggaagctgcagccccgggtcaccgaggagctctggcaggctgccctgagcacgctcaaccccaaccccacggacagctgtcccctctacctgaactacgccaccgtggctgccctgccctgcagggtgagccggcacaacagcccctcggccgcccacttcatcacgcggctggtgcggacctgcctgccgcccggagcgcatcgctgcattgtgatggtctgcgagcagccggaggtctttgcttccgcctgtgccctggcccgggccttcccgctgttcacccaccgctcaggtgcctctcggcgcttggagaagaagacggtcaccgtggagtttttcctggtgggacaagacaacgggccggtggaggtgtccacattgcagtgcttagcgaatgccacagacggcgtgcggctagcagcccgcatcgtggacacaccctgcaatgagatgaacaccgacaccttcctcgaggagattaacaaagttggaaaggagctggggatcatcccaaccatcatccgggatgaggaactgaagacgagaggatttggaggaatctatggggttggcaaagccgccctgcatcccccagccctggccgtcctcagccacaccccagatggagccacgcagaccatcgcctgggtgggcaaaggcatcgtctatgacactggaggcctcagcatcaaagggaagactaccatgccggggatgaagcgagactgcgggggtgctgcggccgtcctgggggccttcagagccgcaatcaagcagggtttcaaagacaacctccacgctgtgttctgcttggctgagaactcggtggggcccaatgcgacaaggccagatgacatccacctgctgtactcagggaagacggtggaaatcaacaacacggatgccgagggcaggctggtgctggcagatggcgtgtcctatgcttgcaaggacctgggggccgacatcatcctggacatggccaccctgaccggggctcagggcattgccacagggaagtaccacgccgcggtgctcaccaacagcgctgagtgggaggccgcctgtgtgaaggcgggcaggaagtgtggggacctggtgcacccgctggtctactgccccgagctgcacttcagcgagttcacctcagctgtggcggacatgaagaactcagtggcggaccgagacaacagccccagctcctgtgctggcctcttcatcgcctcacacatcggcttcgactggcccggagtctgggtccacctggacattgctgcaccggtgcatgctggtgagcgagccacaggcttcggtgtggccctcctgctggcgctcttcggccgtgcctctgaggaccctctgctgaacctggtgtccccactgggctgtgaggtggatgtcgaggagggggacctggggagggactccaagagacgcaggcttgtgtgagcctcctgcctcggccctgacaaacggggatcttttacctcactttgcactgattaattttaagcaattgaaagattgcccttcatatgggttttggtttgtctttctggtcgtcagcgtggtggtggaaacagctgaagttttaggagacagcttagggtttggtgcgggccacggggaggggaccgggaagcgctggggcttgtttctgtttgttacttacaggactgagacatcttctgtaaactgctacccctggggccttctgcaccccggggtgaggcctcctgcctgcctggtgccctgtcccagccccaggtcctgtgcagggcacctgcgtggctgacagccaggctcttactccagccggggctgccagcgcatccagccagcccagccctgtgaaagatggagctgacttgctgcaggggacctgatttatagggcaagagaagtcacactccggcctctcagaattcacttgaggttcaattaaatacagtcacaccgccccctcaaaaaaaaaaaaaaaaaaaaaaaaaaaaaaaaa

SEQ ID NO: 136 - protein, 523 aa, Homo sapiens
  guanine nucleotide binding protein (G protein), alpha stimulating activity polypeptide 1 (GNAS1), GNAS complex locus (GNAS), isoform a, isoform alpha-s-2
MANVGLQFQASAGDSDPQSRPLLLLGQLHHLHRVPWSHVRGKLQPRVTEELWQAALSTLNPNPTDSCPLYLNYATVAALPCRVSRHNSPSAAHFITRLVRTCLPPGAHRCIVMVCEQPEVFASACALARAFPLFTHRSGASRRLEKKTVTVEFFLVGQDNGPVEVSTLQCLANATDGVRLAARIVDTPCNEMNTDTFLEEINKVGKELGIIPTIIRDEELKTRGFGGIYGVGKAALHPPALAVLSHTPDGATQTIAWVGKGIVYDTGGLSIKGKTTMPGMKRDCGGAAAVLGAFRAAIKQGFKDNLHAVFCLAENSVGPNATRPDDIHLLYSGKTVEINNTDAEGRLVLADGVSYACKDLGADIILDMATLTGAQGIATGKYHAAVLTNSAEWEAACVKAGRKCGDLVHPLVYCPELHFSEFTSAVADMKNSVADRDNSPSSCAGLFIASHIGFDWPGVWVHLDIAAPVHAGERATGFGVALLLALFGRASEDPLLNLVSPLGCEVDVEEGDLGRDSKRRRLV

SEQ ID NO: 137 - DNA, 1926 bp, Homo sapiens
  TH1-like (Drosophila) (TH1L), transcript variant 1
ggcgggggcccggccgaggcaataagagcggcggcggcggcagcggcggcagcagctcccgcagctcctgctctggtccgcctcggcccggcggcggccatcagccccctcggcctcggctcgaggggcggggagctgcgcgcgcccctcggtccgaccgacaccctccccttcccgcccgtccgcgcgccccgcggcccgcggcccgcagtccgccccgcgcgctccttgccgaggagccgagcccgcgcccggcccgcccgcccggcgctgccccggccctcccggcccgcgtgaggccgcccgcgcccgccgccgccgcagcccggccgcgccccgccgccgccgccgccgccatgggctgcctcgggaacagtaagaccgaggaccagcgcaacgaggagaaggcgcagcgtgaggccaacaaaaagatcgagaagcagctgcagaaggacaagcaggtctaccgggccacgcaccgcctgctgctgctgggtgctggagaatctggtaaaagcaccattgtgaagcagatgaggatcctgcatgttaatgggtttaatggagagggcggcgaagaggacccgcaggctgcaaggagcaacagcgatggtgagaaggcaaccaaagtgcaggacatcaaaaacaacctgaaagaggcgattgaaaccattgtggccgccatgagcaacctggtgccccccgtggagctggccaaccccgagaaccagttcagagtggactacatcctgagtgtgatgaacgtgcctgactttgacttccctcccgaattctatgagcatgccaaggctctgtgggaggatgaaggagtgcgtgcctgctacgaacgctccaacgagtaccagctgattgactgtgcccagtacttcctggacaagatcgacgtgatcaagcaggctgactatgtgccgagcgatcaggacctgcttcgctgccgtgtcctgacttctggaatctttgagaccaagttccaggtggacaaagtcaacttccacatgtttgacgtgggtggccagcgcgatgaacgccgcaagtggatccagtgcttcaacgatgtgactgccatcatcttcgtggtggccagcagcagctacaacatggtcatccgggaggacaaccagaccaaccgcctgcaggaggctctgaacctcttcaagagcatctggaacaacagatggctgcgcaccatctctgtgatcctgttcctcaacaagcaagatctgctcgctgagaaagtccttgctgggaaatcgaagattgaggactactttccagaatttgctcgctacactactcctgaggatgctactcccgagcccggagaggacccacgcgtgacccgggccaagtacttcattcgagatgagtttctgaggatcagcactgccagtggagatgggcgtcactactgctaccctcatttcacctgcgctgtggacactgagaacatccgccgtgtgttcaacgactgccgtgacatcattcagcgcatgcaccttcgtcagtacgagctgctctaagaagggaacccccaaatttaattaaagccttaagcacaattaattaaaagtgaaacgtaattgtacaagcagttaatcacccaccatagggcatgattaacaaagcaacctttcccttcccccgagtgattttgcgaaacccccttttcccttcagcttgcttagatgttccaaatttagaaagcttaaggcggcctacagaaaaaggaaaaaaggccacaaaagttccctctcactttcagtaaaaataaataaaacagcagcagcaaacaaataaaatgaaataaaagaaacaaatgaaataaatattgtgttgtgcagcattaaaaaaaatcaaaataaaaattaaatgtgagcaaagaatgaaaaaaaaaaaaaaaaaaaa

SEQ ID NO: 138 - protein, 394 aa, Homo sapiens
  TH1-like (Drosophila) (TH1L)
MGCLGNSKTEDQRNEEKAQREANKKIEKQLQKDKQVYRATHRLLLLGAGESGKSTIVKQMRILHVNGFNGEGGEEDPQAARSNSDGEKATKVQDIKNNLKEAIETIVAAMSNLVPPVELANPENQFRVDYILSVMNVPDFDFPPEFYEHAKALWEDEGVRACYERSNEYQLIDCAQYFLDKIDVIKQADYVPSDQDLLRCRVLTSGIFETKFQVDKVNFHMFDVGGQRDERRKWIQCFNDVTAIIFVVASSSYNMVIREDNQTNRLQEALNLFKSIWNNRWLRTISVILFLNKQDLLAEKVLAGKSKIEDYFPEFARYTTPEDATPEPGEDPRVTRAKYFIRDEFLRISTASGDGRHYCYPHFTCAVDTENIRRVFNDCRDIIQRMHLRQYELL

SEQ ID NO: 139 - DNA, 2263 bp, Homo sapiens
  cytokine-like nuclear factor n-pac (N-PAC), bone marrow protein BM045
atgcgccgcgctcgctcgcgggagggcatggcgggggccgtgccgggcgccatcatggacgaggactactacgggagcgcggccgagtggggcgacgaggctgacggcggccagcaggaggatgattctggagaaggagaggatgatgcggaggttcagcaagaatgcctgcataaattttccacccgggattatatcatggaaccctccatcttcaacactctgaagaggtattttcaggcaggagggtctccagagaatgttatccagctcttatctgaaaactacaccgctgtggcccagactgtgaacctgctggccgagtggctcattcagacaggtgttgagccagtgcaggttcaggaaactgtggaaaatcacttgaagagtttgctgatcaaacattttgacccccgcaaagcagattctatttttactgaagaaggagagaccccagcgtggctggaacagatgattgcacataccacgtggcgggaccttttttataaactggctgaagcccatccagactgtttgatgctgaacttcaccgttaagcttatttctgacgcagggtaccagggggagatcaccagtgtgtccacagcatgccagcagctagaagtgttctcgagagtgctccggacctctctagctacaattttagatggaggagaagaaaaccttgaaaaaaatctccctgagtttgccaagatggtgtgccacggggagcacacgtacctgtttgcccaggccatgatgtccgtgctggcccaggaggagcaggggggctccgctgtgcgcaggatcgcccaggaagtgcagcgctttgcccaggagaaaggtcatgacgccagtcagatcacactagccttgggcacagctgcctcctaccccagggcctgccaggctctcggggccatgctgtccaaaggagccctgaaccctgctgacatcaccgtcctgttcaagatgttcacaagcatggaccctcctccggttgaacttatccgcgttccagccttcctggacctgttcatgcagtcactctttaaaccaggggctcggatcaaccaggaccacaagcacaaatacatccacatcttggcgtacgcagcaagcgtggttgagacctggaagaagaacaagcgagtgagcatcaataaagatgagctgaagtcaacgtcaaaagctgtcgaaaccgttcacaatttgtgttgcaacgagaacaaaggggcctctgaactagtggcagaattgagcacactttatcagtgtattaggtttccagtggtagcaatgggtgtgctgaagtgggtggattggactgtatcagaaccaaggtactttcagctgcagactgaccatacccctgtccacctggcgttgctggatgagatcagcacctgccaccagctcctgcacccccaggtcctgcagctgcttgttaagctttttgagactgagcactcccagctggacgtgatggagcagcttgagttgaagaagacactgctggacaggatggttcacctgctgagtcgaggttatgtacttcctgttgtcagttacatccgaaagtgtctggagaagctggacactgacatttcactcattcgctattttgtcactgaggtgctggacgtcattgctcctccttatacctctgacttcgtgcaacttttcctccccatcctggagaatgacagcatcgcaggtaccatcaaaacggaaggcgagcatgaccctgtgacggagtttatagctcactgcaaatctaacttcatcatggtgaactaatttagagcatcctccagagctgaagcagaacattccagaacccgttgtggaaaaaccctttcaagaagctgttttaagaggctcgggcagcgtcttgaaaatgggcaccgctgggaggaggtggatgacttctttacaaaggaaaatggtagcagcttcagtgagaaactgcccttacaaacagtcccttctctgctgtcaatccaatactgctcccaaatcctgttttcagtgttcatttccctcaaggcaggcgctgggctcccacgacccctcaggacagatctggccgtcagccgcgggccgctgggaactccactcggggaactcctttccaagctgacctcagttttctcacaagaacccagttagctgatgttttattgtaattgtcttaatttgctaagaacaagtaataagtaaatttttaaaaagcctttctgctgggttggattaaaaaaaa

SEQ ID NO: 140 - protein, 590 aa, Homo sapiens
  cytokine-like nuclear factor n-pac (N-PAC), bone marrow protein BM045
MAGAVPGAIMDEDYYGSAAEWGDEADGGQQEDDSGEGEDDAEVQQECLHKFSTRDYIMEPSIFNTLKRYFQAGGSPENVIQLLSENYTAVAQTVNLLAEWLIQTGVEPVQVQETVENHLKSLLIKHFDPRKADSIFTEEGETPAWLEQMIAHTTWRDLFYKLAEAHPDCLMLNFTVKLISDAGYQGEITSVSTACQQLEVFSRVLRTSLATILDGGEENLEKNLPEFAKMVCHGEHTYLFAQAMMSVLAQEEQGGSAVRRIAQEVQRFAQEKGHDASQITLALGTAASYPRACQALGAMLSKGALNPADITVLFKMFTSMDPPPVELIRVPAFLDLFMQSLFKPGARINQDHKHKYIHILAYAASVVETWKKNKRVSINKDELKSTSKAVETVHNLCCNENKGASELVAELSTLYQCIRFPVVAMGVLKWVDWTVSEPRYFQLQTDHTPVHLALLDEISTCHQLLHPQVLQLLVKLFETEHSQLDVMEQLELKKTLLDRMVHLLSRGYVLPVVSYIRKCLEKLDTDISLIRYFVTEVLDVIAPPYTSDFVQLFLPILENDSIAGTIKTEGEHDPVTEFIAHCKSNFIMVN

SEQ ID NO: 141 - DNA, 1638 bp, Homo sapiens
  GNAS complex locus (GNAS), transcript variant 8, C20orf45
aggctggggcgtcatcggggccggttagaagctctgctccccggcggggacactcagtcgcgtcggcaccgcggagcgggctgcgtcaggtggctggccggcgcggcgctcccctgctctctggctccgggctgcggcgcggcggctggagcgagcccctgtcccggcgcggggcggcggcgggcggccggcaggcgctgccttgcgtgtgagtgcacctcactcacatgtgctggagaatctggtaaaagcaccattgtgaagcagatgaggatcctgcatgttaatgggtttaatggagagggcggcgaagaggacccgcaggctgcaaggagcaacagcgatggtgagaaggcaaccaaagtgcaggacatcaaaaacaacctgaaagaggcgattgaaaccattgtggccgccatgagcaacctggtgccccccgtggagctggccaaccccgagaaccagttcagagtggactacatcctgagtgtgatgaacgtgcctgactttgacttccctcccgaattctatgagcatgccaaggctctgtgggaggatgaaggagtgcgtgcctgctacgaacgctccaacgagtaccagctgattgactgtgcccagtacttcctggacaagatcgacgtgatcaagcaggctgactatgtgccgagcgatcaggacctgcttcgctgccgtgtcctgacttctggaatctttgagaccaagttccaggtggacaaagtcaacttccacatgtttgacgtgggtggccagcgcgatgaacgccgcaagtggatccagtgcttcaacgatgtgactgccatcatcttcgtggtggccagcagcagctacaacatggtcatccgggaggacaaccagaccaaccgcctgcaggaggctctgaacctcttcaagagcatctggaacaacagatggctgcgcaccatctctgtgatcctgttcctcaacaagcaagatctgctcgctgagaaagtccttgctgggaaatcgaagattgaggactactttccagaatttgctcgctacactactcctgaggatgctactcccgagcccggagaggacccacgcgtgacccgggccaagtacttcattcgagatgagtttctgaggatcagcactgccagtggagatgggcgtcactactgctaccctcatttcacctgcgctgtggacactgagaacatccgccgtgtgttcaacgactgccgtgacatcattcagcgcatgcaccttcgtcagtacgagctgctctaagaagggaacccccaaatttaattaaagccttaagcacaattaattaaaagtgaaacgtaattgtacaagcagttaatcacccaccatagggcatgattaacaaagcaacctttcccttcccccgagtgattttgcgaaacccccttttcccttcagcttgcttagatgttccaaatttagaaagcttaaggcggcctacagaaaaaggaaaaaaggccacaaaagttccctctcactttcagtaaaaataaataaaacagcagcagcaaacaaataaaatgaaataaaagaaacaaatgaaataaatattgtgttgtgcagcattaaaaaaaatcaaaataaaaattaaatgtgagcaaagaa

SEQ ID NO: 142 - RNA, 21 nt, Artificial Sequence
  siRNA sense duplex no. 1 targeting CCND1
acaacuuccuguccuacuauu

SEQ ID NO: 143 - RNA, 21 nt, Artificial Sequence
  siRNA antisense duplex no. 1 targeting CCND1
  modified_base (1)...(1): u modified by 5'-phosphate
uaguaggacaggaaguuguuu

SEQ ID NO: 144 - RNA, 21 nt, Artificial Sequence
  siRNA sense duplex no. 2 targeting CCND1
guucguggccucuaagauguu

SEQ ID NO: 145 - RNA, 21 nt, Artificial Sequence
  siRNA antisense duplex no. 2 targeting CCND1
  modified_base (1)...(1): c modified by 5'-phosphate
caucuuagaggccacgaacuu

SEQ ID NO: 146 - RNA, 21 nt, Artificial Sequence
  siRNA sense duplex no. 3 targeting CCND1
gcauguagucacuuuauaauu

SEQ ID NO: 147 - RNA, 21 nt, Artificial Sequence
  siRNA antisense duplex no. 3 targeting CCND1
  modified_base (1)...(1): u modified by 5'-phosphate
uuauaaagugacuacaugcuu

SEQ ID NO: 148 - RNA, 21 nt, Artificial Sequence
  siRNA sense duplex no. 4 targeting CCND1
gcguguagcuauggaaguuuu

SEQ ID NO: 149 - RNA, 21 nt, Artificial Sequence
  siRNA antisense duplex no. 4 targeting CCND1
  modified_base (1)...(1): a modified by 5'-phosphate
aacuuccauagcuacacgcuu

SEQ ID NO: 150 - RNA, 21 nt, Artificial Sequence
  siRNA sense duplex no. 1 targeting FGF3
gagcugggcuauaauacguuu

SEQ ID NO: 151 - RNA, 21 nt, Artificial Sequence
  siRNA antisense duplex no. 1 targeting FGF3
  modified_base (1)...(1): a modified by 5'-phosphate
acguauuauagcccagcucuu

SEQ ID NO: 152 - RNA, 21 nt, Artificial Sequence
  siRNA sense duplex no. 2 targeting FGF3
ggcgguaccuggccaugaauu

SEQ ID NO: 153 - RNA, 21 nt, Artificial Sequence
  siRNA antisense duplex no. 2 targeting FGF3
  modified_base (1)...(1): u modified by 5'-phosphate
uucauggccagguaccgccuu

SEQ ID NO: 154 - RNA, 21 nt, Artificial Sequence
  siRNA sense duplex no. 3 targeting FGF3
gcgccgagagacugugguauu

SEQ ID NO: 155 - RNA, 21 nt, Artificial Sequence
  siRNA antisense duplex no. 3 targeting FGF3
  modified_base (1)...(1): u modified by 5'-phosphate
uaccacagucucucggcgcuu

SEQ ID NO: 156 - RNA, 21 nt, Artificial Sequence
  siRNA sense duplex no. 4 targeting FGF3
agaagcagagcccggauaauu

SEQ ID NO: 157 - RNA, 21 nt, Artificial Sequence
  siRNA antisense duplex no. 4 targeting FGF3
  modified_base (1)...(1): u modified by 5'-phosphate
uuauccgggcucugcuucuuu

SEQ ID NO: 158 - RNA, 21 nt, Artificial Sequence
  siRNA sense duplex no. 1 targeting PPFIA1
gaagaaagguuacgacagauu

SEQ ID NO: 159 - RNA, 21 nt, Artificial Sequence
  siRNA antisense duplex no. 1 targeting PPFIA1
  modified_base (1)...(1): u modified by 5'-phosphate
ucugucguaaccuuucuucuu

SEQ ID NO: 160 - RNA, 21 nt, Artificial Sequence
  siRNA sense duplex no. 2 targeting PPFIA1
gaguagcacuugaaagauguu

SEQ ID NO: 161 - RNA, 21 nt, Artificial Sequence
  siRNA antisense duplex no. 2 targeting PPFIA1
  modified_base (1)...(1): c modified by 5'-phosphate
caucuuucaagugcuacucuu

SEQ ID NO: 162 - RNA, 21 nt, Artificial Sequence
  siRNA sense duplex no. 3 targeting PPFIA1
agacaaccauaaagugugauu

SEQ ID NO: 163 - RNA, 21 nt, Artificial Sequence
  siRNA antisense duplex no. 3 targeting PPFIA1
  modified_base (1)...(1): u modified by 5'-phosphate
ucacacuuuaugguugucuuu

SEQ ID NO: 164 - RNA, 21 nt, Artificial Sequence
  siRNA sense duplex no. 4 targeting PPFIA1
aaaggacauucguggcuuauu

SEQ ID NO: 165 - RNA, 21 nt, Artificial Sequence
  siRNA antisense duplex no. 4 targeting PPFIA1
  modified_base (1)...(1): u modified by 5'-phosphate
uaagccacgaauguccuuuuu

SEQ ID NO: 166 - RNA, 21 nt, Artificial Sequence
  siRNA sense duplex no. 1 targeting FOLR3
ggacggaccugcucaauguuu

SEQ ID NO: 167 - RNA, 21 nt, Artificial Sequence
  siRNA antisense duplex no. 1 targeting FOLR3
  modified_base (1)...(1): a modified by 5'-phosphate
acauugagcagguccguccuu

SEQ ID NO: 168 - RNA, 21 nt, Artificial Sequence
  siRNA sense duplex no. 2 targeting FOLR3
gaauuggaccucagggauuuu

SEQ ID NO: 169 - RNA, 21 nt, Artificial Sequence
  siRNA antisense duplex no. 2 targeting FOLR3
  modified_base (1)...(1): a modified by 5'-phosphate
aaucccugagguccaauucuu

SEQ ID NO: 170 - RNA, 21 nt, Artificial Sequence
  siRNA sense duplex no. 3 targeting FOLR3
uaacugggaucacugugguuu

SEQ ID NO: 171 - RNA, 21 nt, Artificial Sequence
  siRNA antisense duplex no. 3 targeting FOLR3
  modified_base (1)...(1): a modified by 5'-phosphate
accacagugaucccaguuauu

SEQ ID NO: 172 - RNA, 21 nt, Artificial Sequence
  siRNA sense duplex no. 4 targeting FOLR3
ucucgugggauuauugauuuu

SEQ ID NO: 173 - RNA, 21 nt, Artificial Sequence
  siRNA antisense duplex no. 4 targeting FOLR3
  modified_base (1)...(1): a modified by 5'-phosphate
aaucaauaaucccacgagauu

SEQ ID NO: 174 - RNA, 21 nt, Artificial Sequence
  siRNA sense duplex no. 1 targeting NEU3
acuggauaauagugcguauuu

SEQ ID NO: 175 - RNA, 21 nt, Artificial Sequence
  siRNA antisense duplex no. 1 targeting NEU3
  modified_base (1)...(1): a modified by 5'-phosphate
auacgcacuauuauccaguuu

SEQ ID NO: 176 - RNA, 21 nt, Artificial Sequence
  siRNA sense duplex no. 2 targeting NEU3
gcagagaagcguuccacgauu

SEQ ID NO: 177 - RNA, 21 nt, Artificial Sequence
  siRNA antisense duplex no. 2 targeting NEU3
  modified_base (1)...(1): u modified by 5'-phosphate
ucguggaacgcuucucugcuu

SEQ ID NO: 178 - RNA, 21 nt, Artificial Sequence
  siRNA sense duplex no. 3 targeting NEU3
gagcugaguuggcgaggguuu

SEQ ID NO: 179 - RNA, 21 nt, Artificial Sequence
  siRNA antisense duplex no. 3 targeting NEU3
  modified_base (1)...(1): a modified by 5'-phosphate
acccucgccaacucagcucuu

SEQ ID NO: 180 - RNA, 21 nt, Artificial Sequence
  siRNA sense duplex no. 4 targeting NEU3
cucauuaggcccaugguuauu

SEQ ID NO: 181 - RNA, 21 nt, Artificial Sequence
  siRNA antisense duplex no. 4 targeting NEU3
  modified_base (1)...(1): u modified by 5'-phosphate
uaaccaugggccuaaugaguu

SEQ ID NO: 182 - DNA, 57 bp, Artificial Sequence
  hairpin sequence for TRCN0000005149 shRNA targeting NEU3
ccggagtgacaacatgctccttcaactcgagttgaaggagcatgttgtcactttttt

SEQ ID NO: 183 - DNA, 57 bp, Artificial Sequence
  hairpin sequence for TRCN0000005148 shRNA targeting NEU3
ccggccgagctacagaccaatataactcgagttatattggtctgtagctcggttttt

SEQ ID NO: 184 - DNA, 57 bp, Artificial Sequence
  hairpin sequence for TRCN0000005147 shRNA targeting NEU3
ccggccctgcgtatacctactacatctcgagatgtagtaggtatacgcagggttttt

SEQ ID NO: 185 - DNA, 57 bp, Artificial Sequence
  hairpin sequence for TRCN0000005146 shRNA targeting NEU3
ccggcctaccttctacagccttgtactcgagtacaaggctgtagaaggtaggttttt

SEQ ID NO: 186 - DNA, 57 bp, Artificial Sequence
  hairpin sequence for TRCN0000010926 shRNA targeting NEU3
ccgggcagaagagtggttgtgtgttctcgagaacacacaaccactcttctgcttttt

SEQ ID NO: 187 - DNA, 58 bp, Artificial Sequence
  hairpin sequence for TRCN0000038162 shRNA targeting FGF3
ccggcaagctctactgcgccacgaactcgagttcgtggcgcagtagagcttgtttttg

SEQ ID NO: 188 - DNA, 58 bp, Artificial Sequence
  hairpin sequence for TRCN0000038159 shRNA targeting FGF3
ccggactctatgcttcggagcactactcgagtagtgctccgaagcatagagttttttg

SEQ ID NO: 189 - DNA, 58 bp, Artificial Sequence
  hairpin sequence for TRCN0000038161 shRNA targeting FGF3
ccggcggcagaagcagagcccggatctcgagatccgggctctgcttctgccgtttttg

SEQ ID NO: 190 - DNA, 58 bp, Artificial Sequence
  hairpin sequence for TRCN0000038160 shRNA targeting FGF3
ccgggagctgggctataatacgtatctcgagatacgtattatagcccagctctttttg

SEQ ID NO: 191 - DNA, 97 bp, Artificial Sequence
  hairpin sequence for V2LHS_43059(mir-30) shRNA targeting FGF3
tgctgttgacagtgagcgcccacgagctgggctataatactagtgaagccacagatgtagtattatagcccagctcgtggatgcctactgcctcgga

SEQ ID NO: 192 - DNA, 57 bp, Artificial Sequence
  hairpin sequence for TRCN0000002969 shRNA targeting PPFIA1
ccgggaggagattgaaagtcgagttctcgagaactcgactttcaatctcctcttttt

SEQ ID NO: 193 - DNA, 57 bp, Artificial Sequence
  hairpin sequence for TRCN0000002967 shRNA targeting PPFIA1
ccgggtagtttgttagaagaggaatctcgagattcctcttctaacaaactacttttt

SEQ ID NO: 194 - DNA, 57 bp, Artificial Sequence
  hairpin sequence for TRCN0000002968 shRNA targeting PPFIA1
ccgggctccaagaaatcataagtaactcgagttacttatgatttcttggagcttttt

SEQ ID NO: 195 - DNA, 57 bp, Artificial Sequence
  hairpin sequence for TRCN0000002971 shRNA targeting PPFIA1
ccgggcacagttggaggagaagaatctcgagattcttctcctccaactgtgcttttt

SEQ ID NO: 196 - DNA, 57 bp, Artificial Sequence
  hairpin sequence for TRCN0000002970 shRNA targeting PPFIA1
ccgggcatattaacaagccagcaaactcgagtttgctggcttgttaatatgcttttt

SEQ ID NO: 197 - DNA, 97 bp, Artificial Sequence
  hairpin sequence for V2LHS_27777(mir-30) shRNA targeting PPFIA1
tgctgttgacagtgagcgcccttgaaagggaagaagaaattagtgaagccacagatgtaatttcttcttccctttcaaggatgcctactgcctcgga

SEQ ID NO: 198 - RNA, 19 nt, Artificial Sequence
  BCAS1 siRNA no. 1 target sequence
uaucagggcaguccgauga

SEQ ID NO: 199 - RNA, 19 nt, Artificial Sequence
  BCAS1 siRNA no. 2 target sequence
gaaguagaaucagccuuac

SEQ ID NO: 200 - RNA, 19 nt, Artificial Sequence
  BCAS1 siRNA no. 3 target sequence
gauaagugcuguugcggau

SEQ ID NO: 201 - RNA, 19 nt, Artificial Sequence
  BCAS1 siRNA no. 4 target sequence
ccaauaaagcuccagcgaa

SEQ ID NO: 202 - RNA, 19 nt, Artificial Sequence
  CSTF1 siRNA no. 1 target sequence
ggaaauaucaacgggacga

SEQ ID NO: 203 - RNA, 19 nt, Artificial Sequence
  CSTF1 siRNA no. 2 target sequence
ggaugguguuucaaaucga

SEQ ID NO: 204 - RNA, 19 nt, Artificial Sequence
  CSTF1 siRNA no. 3 target sequence
cgaaugauuaguaucgauu

SEQ ID NO: 205 - RNA, 19 nt, Artificial Sequence
  CSTF1 siRNA no. 4 target sequence
guaugcaauuggucguuca

SEQ ID NO: 206 - RNA, 19 nt, Artificial Sequence
  PCK1 siRNA no. 1 target sequence
cccaagaucuuccauguca

SEQ ID NO: 207 - RNA, 19 nt, Artificial Sequence
  PCK1 siRNA no. 2 target sequence
ccauguacgucaucccauu

SEQ ID NO: 208 - RNA, 19 nt, Artificial Sequence
  PCK1 siRNA no. 3 target sequence
gaagugcuuugcucucagg

SEQ ID NO: 209 - RNA, 19 nt, Artificial Sequence
  PCK1 siRNA no. 4 target sequence
gguggaagguugagugcgu

SEQ ID NO: 210 - RNA, 19 nt, Artificial Sequence
  TMEPAI siRNA no. 1 target sequence
gaaaggacacccucucuag

SEQ ID NO: 211 - RNA, 19 nt, Artificial Sequence
  TMEPAI siRNA no. 2 target sequence
gcacuuguaaagaugauua

SEQ ID NO: 212 - RNA, 19 nt, Artificial Sequence
  TMEPAI siRNA no. 3 target sequence
ucacuuaagaggccaauaa

SEQ ID NO: 213 - RNA, 19 nt, Artificial Sequence
  TMEPAI siRNA no. 4 target sequence
gcgcagaauucuucaccuu

SEQ ID NO: 214 - RNA, 19 nt, Artificial Sequence
  RAB22A siRNA no. 1 target sequence
ggacuacgccgacucuauu

SEQ ID NO: 215 - RNA, 19 nt, Artificial Sequence
  RAB22A siRNA no. 2 target sequence
gaagaauuccauccacuga

SEQ ID NO: 216 - RNA, 19 nt, Artificial Sequence
  RAB22A siRNA no. 3 target sequence
gaaacaaccucugcgaauu

SEQ ID NO: 217 - RNA, 19 nt, Artificial Sequence
  RAB22A siRNA no. 4 target sequence
gcaguuugauuauccgauu

SEQ ID NO: 218 - RNA, 19 nt, Artificial Sequence
  VAPB siRNA no. 1 target sequence
uguuacagccuuucgauua

SEQ ID NO: 219 - RNA, 19 nt, Artificial Sequence
  VAPB siRNA no. 2 target sequence
ccacguagguacuguguga

SEQ ID NO: 220 - RNA, 19 nt, Artificial Sequence
  VAPB siRNA no. 3 target sequence
gcucuuggcucuggugguu

SEQ ID NO: 221 - RNA, 19 nt, Artificial Sequence
  VAPB siRNA no. 4 target sequence
guaauuauugggaagauug

SEQ ID NO: 222 - RNA, 19 nt, Artificial Sequence
  STX16 siRNA no. 1 target sequence
guaugauguuggccggauu

SEQ ID NO: 223 - RNA, 19 nt, Artificial Sequence
  STX16 siRNA no. 2 target sequence
aaauauuccaccagcgauu

SEQ ID NO: 224 - RNA, 19 nt, Artificial Sequence
  STX16 siRNA no. 3 target sequence
gcuaauugagagagcguua

SEQ ID NO: 225 - RNA, 19 nt, Artificial Sequence
  STX16 siRNA no. 4 target sequence
aguaggacuucaucguuua

SEQ ID NO: 226 - RNA, 19 nt, Artificial Sequence
  GNAS siRNA no. 1 target sequence
gcaaguggauccagugcuu

SEQ ID NO: 227 - RNA, 19 nt, Artificial Sequence
  GNAS siRNA no. 2 target sequence
gcaugcaccuucgucagua

SEQ ID NO: 228 - RNA, 19 nt, Artificial Sequence
  GNAS siRNA no. 3 target sequence
augaggauccugcauguua

SEQ ID NO: 229 - RNA, 19 nt, Artificial Sequence
  GNAS siRNA no. 4 target sequence
caaccaaagugcaggacau

What is claimed is:

1. A method for prognosing the outcome of a patient with breast cancer, said method comprising:
providing breast cancer tissue from the patient;
determining from the provided tissue, the level of gene amplification or gene expression product for at least one gene set forth in Table 3;
identifying that the at least one gene or gene product is amplified;
whereby, when the at least one gene or gene product is amplified, this is an indication that the patient has the predicted disease free survival or probability for distant recurrence set forth in Table3.

2. The method of claim 1, wherein the gene or gene product is ACACA (SEQ ID NOs: 1, 2), ADAM9 (SEQ ID NOs: 3-8), ERBB2 (SEQ ID NOs: 9-14), FGFR1 (SEQ ID NOs: 15, 16), FNTA (SEQ ID NOs: 17, 18), IKBKB (SEQ ID NOs: 19, 20), NR1D1 (SEQ ID NOs: 21, 22), PNMT (SEQ ID NOs: 23, 24), or PROSC (SEQ ID NOs: 25, 26).

3. The method of claim 2, wherein the gene or gene product is PROSC (SEQ ID NOs: 25, 26), ADAM9 (SEQ ID NOs: 3-8), FNTA (SEQ ID NOs: 17, 18), ACACA (SEQ ID NOs: 1, 2), PNMT (SEQ ID NOs: 23, 24), or NR1D1 (SEQ ID NOs: 21, 22).

4. The method of claim 1, with a proviso that the gene or gene product is not ERBB2(SEQ ID NOs: 9-14), FGFR1 (SEQ ID NOs: 15, 16), or IKBKB (SEQ ID NOs: 19, 20).

5. The method of claim 1, wherein the gene or gene product is ADAM9 (SEQ ID NOs: 3-8).

6. The method of claim 1, wherein the gene or gene product is FGF3 (SEQ ID NOs: 65, 66), PPFIA1 (SEQ ID NOs: 69, 70), or NEU3 (SEQ ID NOs: 79, 80).

7. The method of claim 6, wherein the breast cancer is a luminal A breast cancer.

8. The method of claim 1, wherein the gene or gene product is CSTF1 (SEQ ID NOs: 117, 118), PCK1 (SEQ ID NOs: 123, 124), VAPB (SEQ ID NOs: 129, 130), GNAS (SEQ ID NOs: 135, 136), BCAS1 (SEQ ID NOs: 115, 116), TMEPA1 (SEQ ID NOs: 125, 126), or STX16 (SEQ ID NOs: 131, 132).

9. The method of claim 8, wherein the gene or gene product is GNAS (SEQ ID NOs: 135, 136), TMEPA1 (SEQ ID NOs: 125, 126), STX16 (SEQ ID NOs: 131, 132), or VAPB (SEQ ID NOs: 129, 130).

10. The method of claim 8, wherein the breast cancer is a luminal A breast cancer.

11. The method of claim 1, wherein the detecting step comprises use a of methodology selected from the group consisting of quantitative PCR, FISH, array CGH, quantitative PCR, in situ hybridization for RNA, immunohistochemistry and reverse phase protein lysate arrays for protein.

12. A method for selecting a patient for treatment with a drug that modulates the expression of a gene set forth in Table 3, said method comprising:
providing tissue biopsy from the patient;
determining from the provided tissue, the level of gene amplification or expression for a gene set forth in Table 3;
identifying that one or more of the genes is amplified or expression increased;
whereby, when the one or more genes are amplified or expression increased, this patent is a candidate for treatment with a drug that modulates the expression of the one or more gene of Table 3.

13. The method of claim 12, wherein the gene is ACACA (SEQ ID NOs: 1, 2), ADAM9 (SEQ ID NOs: 3-8), ERBB2 (SEQ ID NOs: 9-14), FGFR1 (SEQ ID NOs: 15, 16), FNTA (SEQ ID NOs: 17, 18), IKBKB (SEQ ID NOs: 19, 20), NR1D1 (SEQ ID NOs: 21, 22), PNMT (SEQ ID NOs: 23, 24), or PROSC (SEQ ID NOs: 25, 26).

14. The method of claim 13, wherein the gene is PROSC (SEQ ID NOs: 25, 26), ADAM9 (SEQ ID NOs: 3-8), FNTA (SEQ ID NOs: 17, 18), ACACA (SEQ ID NOs: 1, 2), PNMT (SEQ ID NOs: 23, 24), or NR1D1 (SEQ ID NOs: 21, 22).

15. The method of claim 12, with the proviso that the gene is not ERBB2(SEQ ID NOs: 9-14), FGFR1 (SEQ ID NOs: 15, 16), or IKBKB (SEQ ID NOs: 19, 20).

16. The method of claim 12, wherein the gene or gene product is ADAM9 (SEQ ID NOs: 3-8).

17. The method of claim 12, wherein the gene or gene product is FGF3 (SEQ ID NOs: 65, 66), PPFIA1 (SEQ ID NOs: 69, 70), or NEU3 (SEQ ID NOs: 79, 80).

18. The method of claim 12, wherein the gene or gene product is CSTF1 (SEQ ID NOs: 117, 118), PCK1 (SEQ ID NOs: 123, 124), VAPB (SEQ ID NOs: 129, 130), GNAS (SEQ ID NOs: 135, 136), BCAS1 (SEQ ID NOs: 115, 116), TMEPA1 (SEQ ID NOs: 125, 126), or STX16 (SEQ ID NOs: 131, 132).

19. The method of claim 18, wherein the gene or gene product is GNAS (SEQ ID NOs: 135, 136), TMEPA1 (SEQ ID NOs: 125, 126), STX16 (SEQ ID NOs: 131, 132), or VAPB (SEQ ID NOs: 129, 130).

20. The method of claim 12, wherein the determining step comprises use a of methodology selected from the group consisting of quantitative PCR, FISH, array CGH, quantitative PCR, in situ hybridization for RNA, immunohistochemistry and reverse phase protein lysate arrays for protein.

21. A method for treatment of a patient with breast cancer, said method comprising:
providing tissue biopsy from the patient;
determining from the provided tissue, the level of gene amplification or expression for a gene set forth in Table 3;
identifying that one or more of the genes is amplified or expression increased;
whereby, when the one or more genes are amplified or expression increased, this patent is treated with a drug that modulates the expression of the one or more gene.

22. The method of claim 21, wherein the gene is ACACA (SEQ ID NOs: 1), ADAM9 (SEQ ID NOs: 3, 5, 7), ERBB2 (SEQ ID NOs: 9, 11, 13), FGFR1 (SEQ ID NO: 15), FNTA (SEQ ID NO: 17), IKBKB (SEQ ID NO: 19), NR1D1 (SEQ ID NO: 21), PNMT (SEQ ID Ns: 23), or PROSC (SEQ ID Ns: 25).

23. The method of claim 22, wherein the gene is PROSC (SEQ ID NO: 25), ADAM9 (SEQ ID NOs: 3, 5, 7), FNTA (SEQ ID NO: 17), ACACA (SEQ ID NO: 1), PNMT (SEQ ID NO: 23), or NR1D1 (SEQ ID NO: 21).

24. The method of claim 21, with the proviso that the gene is not ERBB2(SEQ ID NOs: 9, 11, 13), FGFR1 (SEQ ID NO: 15), or IKBKB (SEQ ID NO: 19).

25. The method of claim 21, wherein the gene is ADAM9 (SEQ ID NOs: 3, 5, 7).

26. The method of claim 21, wherein the drug is an antisense sequence for a gene of Table 3, and the particular antisense sequence corresponds to the one or more amplified genes identified in the identifying step.

27. The method of claim 26, wherein the gene is FGF3 (SEQ ID NO: 65), PPFIA1 (SEQ ID NO: 69), or NEU3 (SEQ ID NO: 79).

28. The method of claim 26, wherein the gene is CSTF1 (SEQ ID NO: 117), PCK1 (SEQ ID NO: 123), VAPB (SEQ ID NO: 129), GNAS (SEQ ID NO: 135), BCAS1 (SEQ ID NO: 115), TMEPA1 (SEQ ID NO: 125), or STX16 (SEQ ID NO: 131).

29. The method of claim 28, wherein the gene is GNAS (SEQ ID NO: 135), TMEPA1 (SEq ID NO: 125), STX16 (SEQ ID NO: 131), or VAPB (SEQ ID NO: 129).

30. The method of claim 21, wherein the determining step comprises use a of methodology selected from the group consisting of quantitative PCR, FISH, array CGH, quantitative PCR, in situ hybridization for RNA, immunohistochemistry and reverse phase protein lysate arrays for protein.

31. A method for identifying a moiety that modulates a protein, said method comprising:
providing a protein selected from the group consisting of PROSC, ADAM9, FNTA, ACACA, PNMT, and NR1D1;
screening the provided protein with a candidate moiety;
determining whether the candidate moiety modulates the protein; and,
selecting a moiety that modulates the protein.

32. The method of claim 31 wherein the determining step comprises determining whether a function of the protein is modulated.

33. The method of claim 31 wherein the determining step comprises determining whether expression of the protein is modulated.

34. A method for altering the function of a PROSC, ADAM9, FNTA, ACACA, PNMT, or NR1D1 protein in a living cell, said method comprising:
providing a moiety of claim 31;
administering the moiety to a living cell that expresses PROSC, ADAM9, FNTA, ACACA, PNMT, or NR1D1 protein corresponding to the moiety;
whereby, the function of PROSC, ADAM9, FNTA, ACACA, PNMT, or NR1D1 in the cell is altered.

35. A method for prognosing the outcome of a patient with breast cancer, said method comprising:
providing breast cancer tissue from the patient;
determining from the provided tissue, the level of gene deletion for at least one gene from amplicon 8p11-12;
identifying that the at least one gene is deleted;
whereby, when the at least one gene is deleted, this is an indication that the patient has the predicted disease free survival or probability for distant recurrence set forth in Table3.

36. The method of claim 35, wherein the at least one gene from amplicon 8p11-12 is selected from the chromosome 8 genes set forth in Table 3.

37. The method of claim 35, wherein the determining step comprises use a of methodology selected from the group consisting of quantitative PCR, FISH, array CGH, quantitative PCR, in situ hybridization for RNA, immunohistochemistry and reverse phase protein lysate arrays for protein.
